(19) United States
(12) Patent Application Publication
(10) Pub. No.: US 2024/0000972 A1
(43) Pub. Date: Jan. 4, 2024

(54) RNA-TARGETING COMPOSITIONS AND METHODS FOR TREATING CAG REPEAT DISEASES

(71) Applicant: Locanabio, Inc., San Diego, CA (US)

(72) Inventors: David A. NELLES, San Diego, CA (US); Ranjan BATRA, San Diego, CA (US); Daniela ROTH, San Diego, CA (US); Dimitrios ZISOULIS, San Diego, CA (US); Angeline TA, San Diego, CA (US)

(21) Appl. No.: 18/039,813

(22) PCT Filed: Dec. 1, 2021
(86) PCT No.: PCT/US2021/061482

§ 371 Date: Jun. 1, 2023

Related U.S. Application Data
(60) Provisional application No. 63/130,060, filed on Dec. 23, 2020.
(60) Provisional application No. 63/119,977, filed on Dec. 1, 2020.

(51) Int. Cl. A61K 48/00; C12N 15/86; A61P 25/28; C12N 15/11; C12N 9/22

(52) U.S. Cl. CPC A61K 48/0058; C12N 15/86; A61P 25/28; C12N 15/11; C12N 9/22

(57) ABSTRACT

Disclosed are RNA-targeting gene therapy compositions and methods for destroying or blocking toxic target CAG repeat RNA and treating CAG repeat disorders such as Huntington's Disease (HD) and Spinocerebellar Ataxia Type 1 (SCA1).

### RELATED APPLICATIONS

[0001] This application claims benefit of, and priority to, U.S. Ser. No. 63/119,977 filed on Dec. 1, 2020 and U.S. Ser. No. 63/130,060 filed on Dec. 23, 2020; the contents of each are hereby incorporated by reference in their entireties.

### FIELD OF THE DISCLOSURE

[0002] The disclosure is directed to molecular biology, gene therapy, and compositions and methods for modifying expression and activity of RNA molecules.

### INCORPORATION BY REFERENCE OF SEQUENCE LISTING

[0003] The contents of the text file named “LOCN_008_001WO_SeqList_ST25”, which was created on Dec. 1, 2021 and is 140 KB in size, are hereby incorporated by reference in their entirety.

### BACKGROUND

[0004] There are long-felt but unmet needs in the art for providing effective gene therapies, particularly gene therapies which target the underlying pathogenic RNA causing a disease.

[0005] Over 20 unstable microsatellite repeat expansion (MRE) have been identified as the cause of neurological disease in humans. (Rohilla and Gagnon, Acta Neuropahtologica Communications, (2017) 5:63.) Pathogenic RNAs expressed from these repetitive MRE tracts in microsatellite repeat expansion causes a range of debilitating and often devastating diseases and disorders. These repeat RNAs, their location within the genes, the ranges of normal and disease-causing repeat length and the clinical outcomes differ. Unstable repeats can be located in the coding or non-coding region of a gene. Available treatments address symptoms of these MRE diseases but do not target their underlying etiology.

[0006] The most common trinucleotide repeat causing disease by altering protein physiology is the CAG MRE. The translation of the CAG MRE results in a polyQ tract. Many different disorders share a CAG repeat in the coding region of a gene. Although expansion sizes, structures, cellular localization and functions of the resulting proteins differ, all CAG MRE-induced diseases are neurodegenerative and/or neuromuscular diseases or disorders.

[0007] HD is a fatal disorder caused by CAG repeat expansion in the Huntingtin (HTT) gene. The disease leads to degeneration of striatal neurons leading to uncontrolled movements, emotional problems, and dementia. There are currently more than 40,000 patients, and 200,000 at risk patients, in the US.

[0008] Expansion CAG repeats also cause a group of Spinocerebellar Ataxias (SCAs), of which there are nine SCAs described to date, and of which a subset of SCAs is caused by the presence of CAG MREs. SCA1 is caused by the presence of CAG trinucleotide repeats in the ATXN1 gene. SCA type 1 (SCA1) is a rare autodominant disorder characterized by progressive issues with movement. SCA1 symptoms include coordination and balance (ataxia), speech and swallowing difficulties, muscle stiffness (spasticity), and weakness in eye muscles which control eye movements (nystagmus), and cognitive impairment associated with processing, learning and memory. SCA1 affects 1 to 2 per 100,000 worldwide.

[0009] To overcome the absence of disease-modifying therapies for these CAG MRE diseases and disorders, therapeutics need to be delineated and developed for providing effective, sustained, and scalable treatment. RNA-targeting gene therapy systems are ideal for targeting pathogenic trinucleotide repeats such as CAG MREs which are the responsible for the underlying pathology of the disease and disorders.

[0010] Accordingly, the disclosure provides gene therapy compositions and methods for specifically targeting and destroying toxic RNAs expressed from repetitive tracts in microsatellite repeat expansion (MRE) diseases known as trinucleotide CAG repeat disorders such as Huntington's Disease (HD) and Spinocerebellar Ataxias (SCAs). RNA-targeting gene therapy compositions and systems capable of eliminating toxic CAG repeats, and methods using the same for treating CAG MRE-causing diseases and disorders, are provided herein.

### SUMMARY

[0011] The disclosure provides compositions and methods for CAG-repeat disorders. The compositions and methods disclosed herein result in dose-dependent reduction in CAGexP (CAG-repeat expansion) RNA via either destruction or blocking.

[0012] The disclosure provides compositions and methods for treating CAG MRE-causing diseases and disorders.

[0013] Disclosed herein is a method of treating Huntington's Disease (HD) in a mammal comprising administering a composition to a toxic target CAG microsatellite repeat expansion (MRE) molecule in tissues of the mammal, wherein the composition comprises a nucleic acid sequence encoding a non-guided RNA-binding fusion protein comprising a) a PUF RNA-binding sequence or Cas13d RNA-binding protein capable of binding a toxic target CAG RNA repeat sequence, and b) an endonuclease capable of cleaving the toxic target CAG RNA repeat sequence, whereby the level of expression of the toxic target RNA is reduced.

[0014] Disclosed herein is a method of treating Spinocerebellar Ataxia Type 1 (SCA1), in a mammal comprising administering a composition to a toxic target CAG microsatellite repeat expansion (MRE) molecule in tissues of the mammal, wherein the composition comprises a nucleic acid sequence encoding a non-guided RNA-binding fusion protein comprising a) a PUF RNA-binding sequence or Cas13d RNA-binding protein capable of binding a toxic target CAG RNA repeat sequence, and b) an endonuclease capable of cleaving the toxic target CAG RNA repeat sequence, whereby the level of expression of the toxic target RNA is reduced.

[0015] The disclosure provides a composition comprising a nucleic acid sequence encoding an RNA-binding polypeptide comprising a non-guided RNA binding polypeptide or a guided RNA-binding polypeptide capable of binding a toxic target CAG repeat RNA sequence.

[0016] In some embodiments, the RNA-binding polypeptide is a fusion protein. In some embodiments, the fusion protein comprises the RNA binding polypeptide fused to an endonuclease capable of cleaving the toxic CAG repeat RNA sequence.

[0017] In some embodiments, the non-guided RNA binding polypeptide is a PUF or PUMBY protein. In some embodiments, the guided RNA-binding polypeptide is a Cas13d protein. In some embodiments, the cas13d protein is catalytically dead.

[0018] In some embodiments, the casl3d protein comprises an amino acid sequence set forth in any one of SEQ ID NOs 587 or 590-594.

[0019] In some embodiments, the endonuclease is a nuclease domain of a ZC3H12A zinc-finger endonuclease.

[0020] In some embodiments, the PUF RNA binding protein comprises an amino acid sequence set forth in any one of SEQ ID NOs 444-451, 461, 480-488, 549-557, or 656. In some embodiments, the PUF RNA binding protein comprises an amino acid sequence set forth in SEQ ID NO: 549 or 480.

[0021] In some embodiments, the toxic target CAG RNA repeat sequence comprises any one of the nucleic acid sequences set forth in SEQ ID NOs 453-456 or 472-479. In some embodiments, the toxic target CAG RNA repeat sequence comprises the nucleic acid sequence set forth in any one of SEQ ID NO: 453 or 472.

[0022] In some embodiments, the CAG-targeting PUF protein is encoded by a nucleic acid sequence as set forth in SEQ ID NO: 577, 581, 614, 619, 621, or 622.

[0023] In some embodiments, wherein the PUF or PUMBY protein is a human PUF or PUMBY protein. In some embodiments, the PUF or PUMBY protein is linked to the ZC3H12A endonuclease by a linker sequence.

[0024] In some embodiments, the linker comprises the amino acid sequence set forth in SEQ ID NO: 411.

[0025] In some embodiments, the fusion protein comprises one or more signal sequences selected from the group consisting of a nuclear localization sequence (NLS), and a nuclear export sequence (NES).

[0026] In some embodiments, the ZC3H12A zinc finger nuclease comprises the amino acid sequence set forth in SEQ ID NO: 358 or SEQ ID NO: 359.

[0027] In some embodiments, the fusion protein comprises the amino acid sequence set forth in any one of SEQ ID NO: 460. In some embodiments, the fusion protein is encoded by a nucleic acid sequence comprising SEQ ID NO: 574-582.

[0028] In some embodiments, the nucleic acid molecule encoding the fusion protein comprises a promoter. In some embodiments, the promoter is a tCAG promoter, EFS/UBB promoter, or synapsin promoter.

[0029] A vector comprising the composition of any embodiment of the disclosure.

[0030] In some embodiments, the vector is selected from the group consisting of: adeno-associated virus (AAV), retrovirus, lentivirus, adenovirus, nanoparticle, micelle, liposome, lipoplex, polymersome, polyplex, and dendrimer. In some embodiments, is an AAV vector.

[0031] In some embodiments, the AAV vector comprises: a first AAV ITR sequence; a first promoter sequence; a polynucleotide sequence encoding for at least one CAG-repeat RNA binding polypeptide; and a second AAV ITR sequence.

[0032] In some embodiments, the CAG-repeat RNA binding polypeptide comprises a PUF or PUMBY protein. The AAV vector of any embodiment of the disclosure, wherein the polynucleotide sequence encoding the PUF or PUMBY sequence comprises a nucleic acid sequence set forth in SEQ ID NO: 577, 581, 614, 619, 621, or 622.

[0033] In some embodiments, the CAG-repeat RNA binding polypeptide comprises a Cas13d protein. In some embodiments, the polynucleotide sequence encoding the Cas13d sequence comprises a nucleic acid sequence set forth in SEQ ID NO: 587 or 590-594.

[0034] In some embodiments, the first promoter sequence comprises a nucleic acid sequence set forth in SEQ ID NO: 389, 627, or 613.

[0035] In some embodiments, the first AAV ITR sequence comprises a nucleic acid sequence set forth in SEQ ID NO: 597 or 598. In some embodiments, the second AAV ITR sequence comprises a nucleic acid sequence set forth in SEQ ID NO: 597 or 598.

[0036] In some embodiments, the vector further comprises a second promoter sequence.

[0037] In some embodiments, wherein the second promoter controls expression of a guide RNA (gRNA) wherein the gRNA comprises (i) a DR sequence and (ii) a spacer sequence. In some embodiments, the second promoter comprises a nucleic acid sequence set forth in SEQ ID NO: 519.

[0038] In some embodiments, the vector further comprises a polyA sequence. In some embodiments, the vector comprises at least one linker sequence.

[0039] In some embodiments, the vector comprises at least one nuclear localization sequence. In some embodiments, the vector is encoded be a nucleic set forth in any of one of SEQ ID NO: 588, 589, 624, or 625.

[0040] The disclosure provides a pharmaceutical composition comprising: a) the AAV viral vector of any embodiment of the disclosure; and b) at least one pharmaceutically acceptable excipient and/or additive.

[0041] The disclosure provides an AAV viral vector comprising: a) an AAV vector of any embodiment of the disclosure; and b) an AAV capsid protein.

[0042] In some embodiments, the AAV capsid protein is an AAV1 capsid protein, an AAV2 capsid protein, an AAV4 capsid protein, an AAV5 capsid protein, an AAV6 capsid protein, an AAV7 capsid protein, an AAV8 capsid protein, an AAV9 capsid protein, an AAV10 capsid protein, an AAV11 capsid protein, an AAV12 capsid protein, an AAV13 capsid protein, an AAVPHP.B capsid protein, an AAVrh74 capsid protein or an AAVrh.10 capsid protein. In some embodiments, the AAV capsid protein is an AAV9 or AAVrh10 capsid protein

[0043] The disclosure provides a cell comprising the vector of any embodiment of the disclosure.

[0044] The disclosure provides a method of treating a CAG repeat disease in a mammal comprising administering a composition or AAV vector according to any composition of the disclosure to a toxic target CAG microsatellite repeat expansion (MRE) RNA sequence in tissues of the mammal whereby the level of expression of the toxic target RNA is reduced.

[0045] In some embodiments, the composition or AAV vector is administered to the subject intravenously, intrathecally, intracerebrally, intraventricularly, intranasally, intratracheally, intra-aurally, intra-ocularly, or peri-ocularly, orally, rectally, transmucosally, inhalationally, transdermally, parenterally, subcutaneously, intradermally, intramuscularly, intracistemally, intranervally, intrapleurally, topically, intralymphatically, intracisternally or intranerve.

[0046] In some embodiments, the composition or AAV vector is administered to the subject intravenously. In some embodiments, the CAG repeat disorder is Huntington's Disease (HD) or Spinocerebellar Ataxia Type 1 (SCA1)

[0047] In some embodiments, the reduced level of expression of the toxic target RNA thereby ameliorates symptoms of HD or SCA1 in the mammal.

[0048] In some embodiments, the level of expression of the toxic target RNA is reduced compared to the reduction in the level of expression of untreated toxic target CAG RNA.

[0049] In some embodiments, the toxic CAG repeat is a CAG³⁶ or more. In some embodiments, the toxic CAG repeat is a CAG⁸⁰ repeat. In some embodiments, the level of reduction is between 1-fold and 20-fold.

[0050] Disclosed herein is a composition comprising a nucleic acid sequence encoding a non-guided RNA-binding fusion protein comprising a) a PUF or PUMBY protein capable of binding a toxic target CAG repeat RNA sequence and b) an endonuclease capable of cleaving the toxic target RNA sequence, wherein the endonuclease is a nuclease domain of a ZC3H12A zinc-finger endonuclease.

[0051] In some embodiments, the PUF RNA binding protein comprises any one of SEQ ID NOs 444-451, 461, 480-488, or 549-557.

[0052] In some embodiments, the PUF RNA binding protein comprises SEQ ID NO: 549 or 480.

[0053] In some embodiments, the toxic target CAG RNA repeat sequence comprises any one of SEQ ID NOs 453-456 or 472-479.

[0054] In some embodiments, the toxic target CAG RNA repeat sequence comprises SEQ ID NO: 453 or 472.

[0055] In some embodiments, the CAG-targeting PUF protein is encoded by a nucleic acid sequence comprising any one of SEQ ID NOs 577 or 581.

[0056] In some embodiments, the PUF or PUMBY protein is a human PUF or PUMBY protein.

[0057] In some embodiments, the PUF or PUMBY protein is linked to the ZC3H12A by a VDTANGS (SEQ ID NO: 411) linker.

[0058] In some embodiments, the fusion protein comprises one or more signal sequence selected from the group consisting of a nuclear localization sequence (NLS), and a nuclear export sequence (NES).

[0059] In some embodiments, the ZC3H12A zinc finger nuclease comprises SEQ ID NO: 358 or SEQ ID NO: 359.

[0060] In some embodiments, the fusion protein is encoded by a nucleic acid sequence comprising any one of SEQ ID NOs 574-582.

[0061] In some embodiments, the nucleic acid molecule encoding the fusion protein comprises a promoter.

[0062] In some embodiments, the promoter is a tCAG promoter.

[0063] Disclosed herein is a vector comprising any of the preceding compositions.

[0064] In some embodiments, the vector is selected from the group consisting of: adeno-associated virus (AAV), retrovirus, lentivirus, adenovirus, nanoparticle, micelle, liposome, lipoplex, polymersome, polyplex, and dendrimer.

[0065] In some embodiments, is an AAV vector.

[0066] In some embodiments, the AAV vector is AAV9, AAVrh10, or AAVrh.74.

[0067] Disclosed herein is a cell comprising the vector of any preceding embodiment.

[0068] Disclosed herein is a method of treating CAG repeat disease in a mammal comprising administering a composition to a toxic target CAG microsatellite repeat expansion (MRE) RNA sequence in tissues of the mammal, wherein the composition comprises a nucleic acid sequence encoding a non-guided RNA-binding fusion protein comprising a) a PUF RNA-binding protein capable of binding a toxic target CAG RNA repeat sequence, and b) an endonuclease capable of cleaving the toxic target CAG RNA repeat sequence, whereby the level of expression of the toxic target RNA is reduced.

[0069] In some embodiments, the PUF RNA binding protein comprises any one of SEQ ID NOs 444-451, 461, 480-488, or 549-557.

[0070] In some embodiments, the PUF RNA binding protein comprises SEQ ID NO: 549 or 480.

[0071] In some embodiments, the toxic target CAG RNA repeat sequence comprises any one of SEQ ID NOs 453-456 or 472-479.

[0072] In some embodiments, the toxic target CAG RNA repeat sequence comprises SEQ ID NO: 453 or 472.

[0073] In some embodiments, the composition is administered to the tissue of the mammal by intrastriatal administration.

[0074] In some embodiments, the reduced level of expression of the toxic target RNA thereby ameliorates symptoms of the CAG repeat disorder in the mammal.

[0075] In some embodiments, the level of expression of the toxic target RNA is reduced compared to the reduction in the level of expression of untreated toxic target CAG RNA.

[0076] In some embodiments, the level of reduction is between 1-fold and 20-fold.

[0077] In some embodiments, the endonuclease is a domain of a ZC3H12A zinc-finger endonuclease.

[0078] In some embodiments, the domain of the ZC3H12A zinc finger nuclease comprises SEQ ID NO: 358 or SEQ ID NO: 359.

[0079] In some embodiments, the nucleic acid sequence encoding the fusion protein comprises a promoter.

[0080] In some embodiments, the promoter is a tCAG promoter.

[0081] In some embodiments, the promoter is a neuron-specific promoter.

[0082] In some embodiments, the neuron-specific promoter is a synapsin promoter.

[0083] In some embodiments, the fusion protein is encoded by a nucleic acid sequence comprising any one of SEQ ID NOs 574-582.

[0084] A composition comprising a nucleic acid sequence encoding a non-naturally occurring or engineered clustered regularly interspaced short palindromic repeats (CRISPR)-associated (Cas) system comprising: (a) at least one RNA-guided RNse Cas protein; and b) at least one cognate CRISPR-Cas system guide RNA (gRNA) capable of forming a complex with one of the at least one Cas proteins, wherein the gRNA comprises (i) a DR sequence and (ii) a spacer sequence, wherein the spacer sequence hybridizes with the target CAG MRE molecule, and wherein the spacer sequence comprises a spacer sequence selected from the group consisting of: tgctgctgctgctgctgctgctgctg (guide 1, SEQ ID NO: 457), gctgctgctgctgctgctgctgctgc (guide 2, SEQ ID NO: 458), and ctgctgctgctgctgctgctgctgct (guide 3, SEQ ID NO: 458) or a portion thereof, wherein the CRISPR-Cas system is capable of binding and cleaving the target CAG MRE, wherein the CRISPR-Cas system is catalytically inactive, and wherein the CRISPR-Cas is capable of binding but not cleaving the target CAG MRE.

[0085] In some embodiments, the Cas protein is Cas13a, Cas13b, Cas13c, or Cas13d. In some embodiments, the Cas protein is Cas13d.

[0086] In some embodiments, the RNA-guided RNase Cas protein or the non-guided RNA-binding polypeptide is a first RNA-binding polypeptide which is fused with a second RNA-binding polypeptide. In one embodiment, the second RNA-binding polypeptide is capable of binding RNA in a manner in which it associates with RNA. In some embodiments, the second RNA-binding polypeptide is capable of associating with RNA in a manner in which it cleaves RNA. In one embodiment, the second RNA-binding polypeptide is a nuclease domain of a ZC3H12A zinc-finger endonuclease.

[0087] In some embodiments, nucleic acid encoding the Cas or dCas system comprises a promoter. In some embodiments, the promoter is an EFS promoter. In some embodiments, the promoter is a neuron-specific promoter. In some embodiments, the neuron-specific promoter is a synapsin promoter.

[0088] In some embodiments, the CAG repeat disorder is HD or SCA1.

[0089] In some embodiments, the toxic CAG repeat is a CAG³⁶ or more.

In some embodiments, the toxic CAG repeat is a CAG⁸⁰ repeat.

[0090] In another embodiment of the method, the composition is administered to the tissue of the mammal by intracerebellar or intrastriatal administration.

[0091] In another embodiment, the reduced level of expression of the toxic target RNA thereby ameliorates symptoms of the disease in the mammal.

[0092] In another embodiment, the level of expression of the toxic target RNA is reduced compared to the reduction in the level of expression of untreated toxic target CAG RNA.

[0093] In another embodiment, the level of reduction is between 1-fold and 20-fold or elimination of the toxic CAG repeats is between about 20%-100%.

[0094] In another embodiment, the endonuclease is a nuclease domain of a ZC3H12A zinc-finger endonuclease.

[0095] In another embodiment, the nucleic acid sequence comprises a promoter.

[0096] In another embodiment, the promoter is a tCAG promoter.

[0097] In another embodiment, the fusion protein comprises one or more signal sequences selected from the group consisting of NLS, and NES.

[0098] In one embodiment the NLS or NES is a human NLS or human NES. In another embodiment, the human NLS is human pRB-NLS: KRSAEGSNPPKPLKKLR (SEQ ID NO: 442) or human RB-NLS (extended version): DRVLKRSAEGSNPPKPLKKLR (SEQ ID NO: 543).

[0099] In another embodiment, the nucleic acid molecule encoding the fusion protein comprises a promoter.

[0100] In another embodiment, the promoter is a tCAG promoter.

[0101] Disclosed herein is a method of treating CAG repeat disorder HD or SCA1 in a mammal comprising administering a composition to a toxic target CAG microsatellite repeat expansion (MRE) molecule in tissues of the mammal, wherein the composition comprises a nucleic acid sequence encoding a non-naturally occurring or engineered clustered regularly interspaced short palindromic repeats (CRISPR)-associated (Cas) system comprising: (a) at least one RNA-guided RNase Cas protein; and (b) at least one cognate CRISPR-Cas system guide RNA (gRNA) capable of forming a complex with one of the at least one Cas proteins, wherein the gRNA comprises (i) a DR sequence and (ii) a spacer sequence, wherein the spacer sequence hybridizes with the target CAG MRE molecule, and whereby the complex formed by the composition directly targets and destroys the target CAG MRE molecule thereby treating the disease in the mammal.

[0102] In another embodiment of the preceding method, the spacer sequence comprises a spacer sequence selected from the group consisting of: tgctgctgctgctgctgctgctgctg (guide 1, SEQ ID NO: 457), gctgctgctgctgctgctgctgctgc (guide 2, SEQ ID NO: 458), and ctgctgctgctgctgctgctgctgct (guide 3, SEQ ID NO: 459).

[0103] In another embodiment, the composition is administered to the tissue of the mammal by intrastriatal or intracerebellar administration.

[0104] In another embodiment, the RNA-guided RNase Cas protein is selected from the group consisting of Cas13a, Cas13b, Cas13c, Cas13d, and an RNA-binding portion thereof.

[0105] In another embodiment, the RNA-guided RNase Cas protein is Cas13d or an RNA-binding portion thereof.

[0106] In another embodiment, the RNA-guided RNase Cas protein which is catalytically deactivated (dCas).

[0107] In another embodiment, the dCas protein is linked to an endonuclease.

[0108] In another embodiment, the endonuclease is a nuclease domain of a ZC3H12A zinc-finger endonuclease

[0109] In another embodiment, the nucleic acid molecule comprises a promoter capable of driving expression of the RNA-guided Cas protein.

[0110] In another embodiment, the promoter is an EFS promoter.

[0111] Disclosed herein is a composition comprising a nucleic acid sequence encoding a non-naturally occurring or engineered clustered regularly interspaced short palindromic repeats (CRISPR)-associated (Cas) system comprising: (a) at least one RNA-guided RNase Cas protein; and b) at least one cognate CRISPR-Cas system guide RNA (gRNA) capable of forming a complex with one of the at least one Cas proteins, wherein the gRNA comprises (i) a DR sequence and (ii) a spacer sequence, wherein the spacer sequence hybridizes with the target CAG MRE molecule, and wherein the spacer sequence comprises a spacer sequence selected from the group consisting of tgctgctgctgctgctgctgctgctg (guide 1, SEQ ID NO: 457), gctgctgctgctgctgctgctgctgc (guide 2, SEQ ID NO: 458), and ctgctgctgctgctgctgctgctgct (guide 3, SEQ ID NO: 458).

[0112] Disclosed herein is a vector comprising any of the preceding compositions.

[0113] In another embodiment, the vector is selected from the group consisting of: adeno-associated virus (AAV), retrovirus, lentivirus, adenovirus, nanoparticle, micelle, liposome, lipoplex, polymersome, polyplex, and dendrimer.

[0114] In another embodiment, the vector is an AAV vector.

[0115] In another embodiment, the AAV vector is AA9, AAVrh10, or AAVrh.74.

[0116] Disclosed herein is a cell comprising the vector.

### BRIEF DESCRIPTION OF THE DRAWINGS

[0117] The patent or application file contains at least one drawing executed in color. Copies of this patent or patent application publication with color drawing(s) will be provided by the Office upon request and payment of the necessary fee.

[0118] FIG. 1 shows results of a CAG⁸⁰ qPCR assay which demonstrate exemplary embodiments of the CAG-targeting Cas13d compositions and PUF compositions disclosed herein destroy toxic CAG repeats. Reduction of the toxic repeats in a Cas13d-based system (labeled Cas13d-L1) is shown using three different guides CAG-g1, CAG-g2, and CAG-g3. Reduction of the toxic repeats in a PUF-based system is shown using an exemplary nucleic acid molecule encoding a 8PUF(CAG)-E17 fusion protein (labeled CAG-f1 targeting frame 1: CAGCAGCA, and a CAG-f2 targeting frame 2: GCAGCAC). E17 is a domain of the ZC3H12A nuclease. Results are normalized to non-targeting controls and shown as mean+/−s.d. of biological replicates (n=2).

[0119] FIG. 2 shows the results of an RNA Fluorescence In Situ Hybridization (FISH) assay with the exemplary CAG-targeting Cas13d and PUF compositions disclosed herein as compared to non-targeting controls. CosM6 cells were co-transfected with the CAG-80 reporter gene and either non-targeting (left) or CAG-targeting Cas13d (right). Cells were fixed with 4% PFA 48 hours post transfection and RNA FISH was performed with (CAG)10 antisense DNA probe labeled with Alexa-546 (red) followed by Immunofluorescence with anti-polyQ primary antibody and anti-mouse secondary antibody labeled with Alexa-488 (green).

[0120] FIG. 3A-C shows exemplary vector configurations of the CAG-repeat gene therapy compositions disclosed herein. FIG. 3A illustrates a CAG-repeat gene therapy construct configuration comprising CAG-targeting PUF-E17 operably linked to truncated CAG promoter (tCAG). FIG. 3B illustrates a CAG-repeat gene therapy construct configuration comprising a CAG-targeting catalytically deactivated Cas13d fused to E17 and corresponding guide operably linked to EFS promoter. FIG. 3C illustrates a CAG-repeat gene therapy construct configuration comprising a CAG-targeting Cas13d and corresponding guide operably linked to EFS promoter.

[0121] FIG. 4 depicts an alignment of a CAG-targeting PUF with human PUM1 with mismatches highlighted.

[0122] FIG. 5 depicts allele preferential CAG targeting with the compositions disclosed herein. CAG expansions (CAG^{exp}) in HD prevents Exon1-2 splicing leading to overproduction of CAG^{exp} containing HTT Exon1 isoforms. In some aspects, CAG^{exp} containing HTT Exon1 isoforms are referred to as mutant HTT (mHTT).

[0123] FIG. 6A is a graph depicting percent change in body weight in mice treated with either an AAVrh10-1684 vector or AAVrh10-1589 vector at a mid-dose relative to a sham control.

[0124] FIG. 6B is a table depicting the vector composition of the AAVrh10-1684 vector and the AAVrh10-1589 vector. AAVrh10-1684 comprises an EFS/UBB promoter controlling expression of a CAG-targeted PUF protein lacking an endonuclease fusion. AAVrh10-1589 comprises an EFS/UBB promoter controlling expression of an E17 endonuclease lacking a CAG-targeting RNA binding protein.

[0125] FIG. 7 is a series of images depicting expression of AAVrh10-1383 (LBIO-210; CAG-targeting PUF) in non-human primates before (FIG. 7A) and after (FIG. 7B) delivery optimization.

[0126] FIG. 8A is a schematic detailing the reduction in mutant HTT protein levels via CAG repeat targeting fusion proteins comprising a CAG-repeat RNA binding protein and an endonuclease wherein the fusion protein binds the mutant HTT mRNA which is cleaved by the endonuclease.

[0127] FIG. 8B is a schematic detailing the reduction in mutant HTT protein levels via CAG repeat targeting proteins wherein the CAG repeat targeting protein binds the mutant HTT and blocks translation. In some aspects, the CAG repeat targeting protein comprises an endonuclease fusion. In some aspects, the CAG repeat targeting protein does not comprise an endonuclease fusion.

[0128] FIG. 9A is a table depicting vector constructs used in FIGS. 9B and 9C. Study HD08 group 1 is divided into two halves (hemispheres): hemi 1 utilized AAV9-rCas9-PIN and a non-targeting (NT) guide RNA (AAV9-1475) while the other hemi (hemi 2) utilized AAV9-rCas9-PIN with a CAG repeat-targeting guide RNA (AAV9-1347). Study HD08b was divided into group 2 AV9-RCas9-PIN+CAG guide (AAV9-1347) and group 3 AAV9-RCas9-PIN+NT guide (AAV9-1475).

[0129] FIG. 9B is a series of graphs depicting relative mutant HTT (mHTT) RNA levels* and protein (soluble mHTT) levels in mice following treatment with RCas9+NT or RCas9+CAG (Study HD08). *mHTT RNA levels Normalized to Atp5b and Eif4a2.

[0130] FIG. 9C is a series of graphs depicting relative mutant HTT (mHTT) RNA levels in mice following treatment with AAV9-rCas9-PIN+AAV-1475 (NT guide)) or AAV9-rCas9-PIN+AAV9-1347 (CAG guide) and relative Darpp32 levels and relative Pdel0a levels*. (Study HD08b). *Normalized to Atp5b and Eif4a2.

[0131] FIG. 10A is a series of fluorescent images of zQ175 P1 cortical neuron cultures immunohistochemically stained for NeuN or GFAP. Cultures are shown to contain both neurons and astrocytes.

[0132] FIG. 10B is a fluorescent image depicting expression of green fluorescent protein (GFP) following transduction with an AAVrh.10-GFP vector demonstrating that the zQ175 P1 cortical neuron cultures are readily transduced by AAVrh10.

[0133] FIG. 10C is a graph depicting mutant HTT RNA levels in zQ175 P1 cortical neuron cultures following transduction with control (UTC), Syn Clover, or A01380 (PUF(CAG)-E17) at 1E4, 1E5, or 1E6 MOI doses.

[0134] FIG. 11A is a series of images of Huntington Disease patient-derived fibroblasts.

[0135] FIG. 11B is an image of a gel depicting both wild-type and mutated HTT.

[0136] FIG. 12 is a graph depicting lack of mHTT expression in P1 neuronal cultures derived from untreated wild-type (WT) and HET (heterozygous) pups as measured by qRT-PCR. HET-specific expression of mHTT is demonstrated using raw Cts (cycle thresholds).

[0137] FIG. 13A is a graph depicting mHTT expression normalized as a percentage of UTC expression in P1 neurons derived from heterozygous zQ175 mouse pups transduced with CAG-targeting PUF and Seq212 vector constructs at 1E5 and 1E6 MOI for 7 days. Samples include untreated control (UTC), A01383_1E5 (1×10⁵ vg), A01477_1E5, A01477_1E6, A01479_1E5, A01479_1E6, A01553_1E5, A01553_1E6, and AA09sh.

[0138] FIG. 13B is a graph depicting wt HTT expression normalized as a percentage of UTC expression in P1 neurons derived from heterozygous zQ175 mouse pups transduced with CAG-targeting PUF and Seq212 vector constructs at 1E5 and 1E6 MOI for 7 days. Samples include untreated control (UTC), A01383_1E5 (1×10⁵ vg), A01477_1E5, A01477_1E6, A01479_1E5, A01479_1E6, A01553_1E5, A01553_1E6, and AA09sh.

[0139] FIG. 14A is a graph depicting mHTT expression measured by Meso Scale Discovery Immunoassay (MSD) in P1 neurons derived from heterozygous zQ175 mouse pups transduced with CAG-targeting PUF and CAG-targeting cas13d vectors at 1E5 or 1E6 MOI for 7 days. Samples include untreated control (UTC), A01383, A01479, A01922, and wt. Data is presented for two mice pups.

[0140] FIG. 14B is a graph depicting mHTT expression normalized as a percentage of UTC expression in P1 neurons derived from heterozygous zQ175 mouse pups transduced with CAG-targeting PUF and CAG-targeting casl3d vectors at 1E5 or 1E6 MOI for 7 days. Samples include untreated control (UTC), A01383, A01479, A01922, and wt. Data is presented for two mice pups.

[0141] FIG. 15A is a graph depicting casl3d Seq212 expression in P1 neurons derived from heterozygous zQ175 mouse pups transduced with CAG-targeting cas13d Seq212 constructs at 1E5 and 1E6 MOI for 7 days. Cas13d expression is normalized to ATP5b. Vectors assessed include A01477, A01479, and A01553.

[0142] FIG. 15B is a graph depicting casl3d guide RNA expression in P1 neurons derived from heterozygous zQ175 mouse pups transduced with CAG-targeting cas13d Seq212 constructs at 1E5 and 1E6 MOI for 7 days. Vectors assessed include A01477, A01479, and A01553.

[0143] FIG. 16A is a series of graphs depicting expression of neuronal and microglial activation biomarkers AIF1, PDE10A, PPPIR1B, and RBFOX3 in P1 neurons transduced with CAG-targeting PUF A01383 at 1E5 MOI for 7 days relative to UTC cells.

[0144] FIG. 16B is a series of graphs depicting expression of neuronal and microglial activation biomarkers PDE10A, PPPIR1B, and RBFOX3 in P1 neurons transduced with CAG-targeting PUF A01383 at 1E5 MOI for 7 days relative to UTC cells.

[0145] FIG. 17 is graph depicting fold change differences in cytotoxicity relative to UTC in P1 neurons transduced with CAG-targeting constructs at 1E5 MOI for 7 days. Samples include, wt, heterozygous (het), A01383 vector, A01684 vector, A01479 vector, or A01922 vector.

[0146] FIG. 18A is a schematic depicting a CAG-targeting PUF protein suitable for binding CAG-repeat RNA and blocking the RNA resulting in destruction of bound RNA and/or inhibition of translation of the bound RNA.

[0147] FIG. 18B is a schematic depicting a CAG-targeting dCas13d protein suitable for binding CAG-repeat RNA and blocking the RNA resulting in destruction of bound RNA and/or inhibition of translation of the bound RNA.

[0148] FIG. 19 is a table listing exemplary AAV vector comprising CAG-targeting compositions of the disclosure.

### DETAILED DESCRIPTION

[0149] The disclosure provides RNA-targeting gene therapy compositions and methods for treating CAG trinucleotide repeat- or CAG MRE-causing diseases and/or disorders such as HD and SCA1.

[0150] HD and SCA1 are fatal, progressive autosomal dominant diseases caused by expanded CAG repeats in HTT and ATXN1 genes, respectively. These repeats code for polyglutamine tracts, the size of which correlates with onset and progression of the diseases.

[0151] The human Huntingtin (HTT) gene has 67 exons. CAG repeat expansions in Exon1 lead to polyQ protein aggregation and HD. HD disease onset is inversely correlated with the number of CAG repeats. All single nucleotide polymorphisms (SNPs) are linked with the expanded CAG allele downstream of Exon 1. Targeting HTT in an allele specific manner utilizing SNPs linked with expansion will target the highly pathogenic short CAG containing HTTexon1 isoform. Targeting Exon 1 outside the CAG repeats will not lead to allele specific knockdown. The gene therapy compositions and methods disclosed here for treating HD target CAG repeats in an allele preferential manner and allows for expression of normal HTT protein (FIG. 5).

[0152] In HD, the CAG segment is repeated 36 to 120 times within the mutant HTT gene compared to what is considered the normal CAG repeat of 10 to 35 times within the HTT gene. An increase in the size of the CAG segment leads to the production of an abnormally long version of the huntingtin protein, which is cut into smaller, toxic fragments that bind together and accumulate in neurons, disrupting the normal functions of these cells. This disfunction and eventual death of neurons in certain areas of the brain underlie the signs and symptoms of HD.

[0153] In SCA1, the CAG segment is repeated 40 to more than 80 times within the mutant ATXN1 gene compared to what is considered the normal CAG repeat of 4 to 39 times in the ATXN1 gene. This increase in the CAG segment leads to the production of an abnormally long version of the ataxin-1 protein which folds into the wrong 3-dimensional shape. This abnormality in protein folding causes the protein to cluster with other proteins to form clumps (aggregates) within the nucleus of the cells and leads to cell damage and ultimate cell death. Targeting and eliminating (or blocking) CAG repeats is a therapeutic strategy for HD and SCA1.

[0154] The gene therapy compositions disclosed herein provide improved cleavage of toxic CAG repeats in methods of treating CAG-repeat diseases and/or disorders (FIG. 8A). In other embodiments of the disclosure, gene therapy compositions disclosed herein block the expression of toxic CAG-repeat containing mRNA transcripts (FIG. 8B). These gene therapy compositions are capable of specifically targeting toxic CAG repeat RNA and providing long-term repair of the disease phenotypes associated with diseases such as HD and SCA1. These gene therapy compositions also provide efficient cleavage or blocking of toxic CAG repeat RNA. Such gene therapy compositions for targeting CAG MREs are important for scaling of therapeutic systems in manufacturing because the components of the compositions are a small enough size to rely on a unitary (single) vector. The gene therapy compositions disclosed herein are capable of achieving more effective knockdown or blocking of the toxic CAG repeats compared to non-treatment.

[0155] Disclosed herein are compositions comprising nucleic acid molecules, and vectors comprising the same, encoding guided or non-guided RNA-binding systems capable of binding toxic CAG repeat RNA for treating CAG-repeat diseases such as HD and SCA1. Such compositions are capable of targeting and binding for either knockdown/destruction or blocking the toxic CAG repeats. In some aspects, compositions suitable for blocking CAG-repeat RNA bind a CAG-repeat containing RNA and prevent translation of the CAG-repeat RNA. In some aspects, this prevented translation results in reduced protein expression from CAG-repeat containing RNA sequences. These systems comprise either RNA-guided RNase Cas, such as Cas13d, or non-guided PUF, PUMBY or PPR protein configurations.

[0156] In any of the preceding or subsequent RNA-targeting compositions for treating HD or SCA1, any particular construct element (e.g., linker, promoter, signal sequence, etc.,) described in the context of a specific RNA-targeting composition, can be substituted for another of the same element type (e.g., linker, promoter, signal sequence, etc.). In some embodiments, any particular construct element can be omitted or removed (such as a tag sequence). In other words, the exemplary combinations of elements in any particular gene therapy composition described herein is not intended to be limiting.

### Exemplary Blocking RNA-targeting Compositions

[0157] Expanded CAG (CAG^{exp}) repeats in HTT or ATXN1 mRNA lead to protein aggregation of HTT or ataxin-1 causing loss of their function. PUF(CAG) or dCas13d(CAG) will bind CAGexP RNA directly and block the CAG^{exp} RNA leading to sequestration of blocked/inhibited translation ultimately resulting in reduced levels of mutated protein such as mHTTT or mATXN1.

[0158] Exemplary blocking CAG-targeting PUF protein compositions include:

PUFs targeting CAG frame 2 (blocking) w/ myc tag

| | Protein | | Target | |
|---|---|---|---|---|
| Construct | Type | Elements | Sequence | Amino Acid Sequence of PUF |
| A01684 | 8PUF | N-terminal PUF; | GCAGCAGC | GRSRLLEDFRNNRYPNLQLREIAG |
| | | linker between | (SEQ ID NO: | HIMEFSQDQHGSRFIRLKLERATP |
| | | PUF and myc | 476) | AERQLVFNEILQAAYQLMVDVFG |
| | | tag (GGS); | | SYVIEKFFEFGSLEQKLALAERIRG |
| | | C-terminal myc | | HVLSLALQMYGCRVIQKALEFIPS |
| | | tag | | DQQNEMVRELDGHVLKCVKDQN |
| | | | | GSYVVRKCIECVQPQSLQFIIDAFK |
| | | | | GQVFALSTHPYGSRVIERILEHCLP |
| | | | | DQTLPILEELHQHTEQLVQDQYGC |
| | | | | YVIQHVLEHGRPEDKSKIVAEIRG |
| | | | | NVLVLSQHKFASYVVRKCVTHAS |
| | | | | RTERAVLIDEVCTMNDGPHSALY |
| | | | | TMMKDQYASYVVEKMIDVAEPG |
| | | | | QRKIVMHKIRPHIATLRKYTYGKH |
| | | | | ILAKLEKYYMKNGVDLG (SEQ ID |
| | | | | NO: 549) |
| A01683 | 8PUF | PUF | GCAGCAGC | GRSRLLEDFRNNRYPNLQLREIAG |
| | | | (SEQ ID NO: | HIMEFSQDQHGSRFIRLKLERATP |
| | | | 476) | AERQLVFNEILQAAYQLMVDVFG |
| | | | | SYVIEKFFEFGSLEQKLALAERIRG |
| | | | | HVLSLALQMYGCRVIQKALEFIPS |
| | | | | DQQNEMVRELDGHVLKCVKDQN |
| | | | | GSYVVRKCIECVQPQSLQFIIDAFK |
| | | | | GQVFALSTHPYGSRVIERILEHCLP |
| | | | | DQTLPILEELHQHTEQLVQDQYGC |
| | | | | YVIQHVLEHGRPEDKSKIVAEIRG |
| | | | | NVLVLSQHKFASYVVRKCVTHAS |
| | | | | RTERAVLIDEVCTMNDGPHSALY |
| | | | | TMMKDQYASYVVEKMIDVAEPG |
| | | | | QRKIVMHKIRPHIATLRKYTYGKH |
| | | | | ILAKLEKYYMKNGVDLG (SEQ ID |
| | | | | NO: 549) |

### RNA-Guided CAG-Repeat RNA Binding Systems

[0159] In some embodiments, the RNA-guided RNA-binding system is an RNase Cas-based RNA-guided RNA-binding polypeptide. In some embodiments, a nucleic acid sequence encodes an RNA-guided RNA-binding polypeptide which is an RNase Cas protein (or a deactivated RNase Cas protein). In one embodiment, the nucleic acid sequence further comprises a gRNA sequence comprising a spacer sequence which binds to a toxic target CAG repeat RNA and a direct repeat (DR) sequence which binds to the RNase Cas protein.

[0160] In one embodiment, a Cas13d(CAG) system is catalytically active, in which case, the Cas13d nucleoprotein complex cleaves and destroys toxic RNA CAG repeats. In another embodiment, a Cas13d(CAG) system is catalytically inactive, in which case, the Cas13d nucleoprotein complex binds and blocks (but does not cleave) the RNA CAG repeats. In yet another embodiment, a Cas13d(CAG) comprises a catalytically inactive Cas13d(CAG) fused to an endonuclease which is capable of cleaving the toxic RNA CAG repeats. In such an embodiment, the endonuclease is an active RNase. Exemplary endonucleases with RNase activity can be found herein, and these include, for example, a domain from a ZC3H12A zinc-finger (also referred herein as E17) or a PIN endonuclease.

TABLE 1
Exemplary spacer sequences used in sgRNAs for CAG
targeting with RNase Cas systems for treating CAG-
repeat disease:

| Spacer | Spacer Sequences |
|---|---|
| 1 | tgctgctgctgctgctgctgctgctg (SEQ ID NO: 457) |
| 2 | gctgctgctgctgctgctgctgctgc (SEQ ID NO: 458) |
| 3 | ctgctgctgctgctgctgctgctgct (SEQ ID NO: 459) |

[0161] In one embodiment, the RNase Cas protein is a Cas13 protein. In another embodiment, the Cas13 protein is a Cas13d protein. In another embodiment, the Cas13d protein is a deactivated RNase Cas13d protein (dCas13d). In another embodiment, the dCas13d protein is a fusion protein comprising 1) dCas13d and 2) a polypeptide encoding a protein or fragment thereof having nuclease activity. In another embodiment, the dCas13d protein is a fusion protein comprising 1) dCas13d and 2) a nuclease domain of ZC3H12A, a zinc-finger endonuclease, (referred to as E17 herein). In some embodiments, the Cas configuration comprises a signal sequence(s) such as NLS(s) and/or NES(s). In some embodiments, the dCas13d is linked to E17 via a linker sequence. In one embodiment, the linker sequence is VDTANGS (SEQ ID NO: 411). In some embodiments, the nucleic acid sequence encoding the Cas13d or dCas13d fusion proteins are operably linked to at least one promoter sequence. In some embodiments, the promoter sequence comprises an enhancer and/or an intron. In some embodiments, the promoter sequence is an EFS promoter sequence, tCAG promoter sequence, EFS/UBB promoter sequence, EFS promoter sequence, or synapsin sequence (FIG. 3B, FIG. 3C, FIG. 20A, and FIG. 20B).

[0162] In some embodiments, the nucleic acid sequence comprises a first promoter sequence that controls expression of a Cas13d protein or Cas13d fusion protein and a second promoter sequences that controls expression of the at least one guide RNA sequence. In some embodiments, the Cas13d or dCas13d system targets expanded CAG repeats, wherein the CAG repeats are CAG³⁶ or more. In some embodiments, the CAG repeats are CAG⁸⁰. In some aspects, CAG³⁶ or CAG⁸⁰ refers to 36 CAG repeats or 80 CAG repeats in the HTT or ATXN1 gene. Any other number of CAG repeats are possible, including at least 1, 2, 3, 4, 5, 6, 7, 8, 9, 10, 15, 20, 25, 30, 35, 36, 37, 38, 39, 40, 41, 42, 43, 44, 45, 46, 47, 48, 49, 50, 55, 60, 65, 70, 75, 76, 77, 78, 79, 80, 81, 82, 83, 84, 85, 90, 95, 100, 105, 110, 115, 120 CAG repeats, or any other number of CAG repeats in between.

[0163] In some embodiments, a CAG-repeat targeting dCas13d protein of the disclosure comprises from N-terminal to C-terminal: dCas13d (dSeq212), a linker, an SV-40 NLS, a linker, and an HA tag. In some embodiments, a dCas13d protein of the disclosure comprises from N-terminal to C-terminal: dCas13d (dSeq212), a linker, an SV-40 NLS, and a linker. In some aspects, the CAG-repeat targeting dCas13d protein of the disclosure is set forth in Table A. In some aspects, the CAG-repeat targeting dCas13d protein is used for methods of blocking CAG-repeat RNA sequence expression.

TABLE A
CAG-repeat targeting dCas 13d protein

| | |
|---|---|
| Dead Seq212 | KKKHQSAAEKRQVKKLKNQEKAQKYASEPSPLQSDTAGVECSQKKTVVS |
| | HIASSKTLAKAMGLKSTLVMGDKLVITSFAASKAVGGAGYKSANIEKITDL |
| | QGRVIEEHERMFSADVGEKNIELSKNDCHTNVNNPVVTNIGKDYIGLKSRL |
| | EQEFFGKTFENDNLHVQLAYNILDIKKILGTYVNNIIYIFYNLNRAGTGRDE |
| | RMYDDLIGTLYAYKPMEAQQTYLLKGDKDMRRFEEVKQLLQNTSAYYVY |
| | YGTLFEKVKAKSKKEQRAKEAEIDACTAHNYDVLRLLSLMRQLCMHSVA |
| | GTAFKLAESALFNIEDVLSADLKEILDEAFSGAVNKLNDGFVQHSGNNLYV |
| | LQQLYPNETIERIAEKYYRLTVRKEDLNMGVNIKKLRELIVGQYFPEVLDK |
| | EYDLSKNGDSVVTYRSKIYTVMNYILLYYLEDHDSSRESMVEALRQNREG |
| | DEGKEEIYRQFAKKVWNGVSGLFGVCLNLFKTEKRNKFRSKVALPDVSGA |
| | AYMLSSENIDYFVKMLFFVCKFLDGKEINELLCALINKFDNIADILDAAAQC |
| | GSSVWFVDSYRFFERSRRISAQIRIVKNIASKDFKKSKKDSDESYPEQLYLD |
| | ALALLGDVISKYKQNRDGSVVIDDQGNAVLTEQYKRFRYEFFEEIKRDESG |
| | GIKYKKSGKPEYNHQRRNFILNNVLKSKWFFYVVKYNRPSSCRELMKNKE |
| | ILRFVLRDIPDSQVRRYFKAVQGEEAYASAEAMRTRLVDALSQFSVTACLD |
| | EVGGMTDKEFASQRAVDSKEKLRAIIRLYLTVAYLITKSMVKVNTRFSIAF |
| | SVLERDYYLLIDGKKKSSDYTGEDMLALTRKFVGEDAGLYREWKEKNAE |
| | AKDKYFDKAERKKVLRQNDKMIRKMHFTPHSLNYVQKNLESVQSNGLAA |
| | VIKEYRNAVAALNIINRLDEYIGSARADSYYSLYCYCLQMYLSKNFSVGYL |
| | INVQKQLEEHHTYMKDLMWLLNIPFAYNLARYKNLSNEKLFYDEEAAAE |
| | KADKAENERGE (SEQ ID NO: 587) |
| Linker | GS |
| SV-40 NLS | PKKKRKV (SEQ ID NO: 437) |
| Linker | ED |
| HA Tag | YPYDVPDYA (SEQ ID NO: 586) |

[0164] In some embodiments, a CAG-repeat targeting casl3d or dCas13d protein of the disclosure comprises from N-terminal to C-terminal: dCas13d (dSeq212), a linker, an SV-40 NLS, a linker, and an HA tag. In some embodiments, a dCas13d protein of the disclosure comprises from N-terminal to C-terminal: dCas13d (dSeq212), a linker, and an SV-40 NLS. In some aspects, the CAG-repeat targeting dCas13d protein of the disclosure is set forth in Table B. In some aspects, the CAG-repeat targeting dCas13d protein is used for methods of blocking CAG-repeat RNA sequence expression.

TABLE B
CAG-repeat targeting dCas13d protein

| Plasmid Element | Amino Acid Sequences |
|---|---|
| Dead Seq212 | KKKHQSAAEKRQVKKLKNQEKAQKYASEPSPLQSDTAGVECSQKKTVVS |
| | HIASSKTLAKAMGLKSTLVMGDKLVITSFAASKAVGGAGYKSANIEKITDL |
| | QGRVIEEHERMFSADVGEKNIELSKNDCHTNVNNPVVTNIGKDYIGLKSRL |
| | EQEFFGKTFENDNLHVQLAYNILDIKKILGTYVNNIIYIFYNLNRAGTGRDE |
| | RMYDDLIGTLYAYKPMEAQQTYLLKGDKDMRRFEEVKQLLQNTSAYYVY |
| | YGTLFEKVKAKSKKEQRAKEAEIDACTAHNYDVLRLLSLMAQLCMASVA |
| | GTAFKLAESALFNIEDVLSADLKEILDEAFSGAVNKLNDGFVQHSGNNLYV |
| | LQQLYPNETIERIAEKYYRLTVRKEDLNMGVNIKKLRELIVGQYFPEVLDK |
| | EYDLSKNGDSVVTYRSKIYTVMNYILLYYLEDHDSSRESMVEALRQNREG |
| | DEGKEEIYRQFAKKVWNGVSGLFGVCLNLFKTEKRNKFRSKVALPDVSGA |
| | AYMLSSENIDYFVKMLFFVCKFLDGKEINELLCALINKFDNIADILDAAAQC |
| | GSSVWFVDSYRFFERSRRISAQIRIVKNIASKDFKKSKKDSDESYPEQLYLD |
| | ALALLGDVISKYKQNRDGSVVIDDQGNAVLTEQYKRFRYEFFEEIKRDESG |
| | GIKYKKSGKPEYNHQRRNFILNNVLKSKWFFYVVKYNRPSSCRELMKNKE |
| | ILRFVLRDIPDSQVRRYFKAVQGEEAYASAEAMRTRLVDALSQFSVTACLD |
| | EVGGMTDKEFASQRAVDSKEKLRAIIRLYLTVAYLITKSMVKVNTRFSIAF |
| | SVLERDYYLLIDGKKKSSDYTGEDMLALTRKFVGEDAGLYREWKEKNAE |
| | AKDKYFDKAERKKVLRQNDKMIRKMHFTPHSLNYVQKNLESVQSNGLAA |
| | VIKEYANAVAALNIINRLDEYIGSARADSYYSLYCYCLQMYLSKNFSVGYL |
| | INVQKQLEEHHTYMKDLMWLLNIPFAYNLARYKNLSNEKLFYDEEAAAE |
| | KADKAENERGE (SEQ ID NO: 590) |
| Linker | GS |
| SV-40 NLS | PKKKRKV (SEQ ID NO: 437) |
| Linker | ED |
| HA Tag | YPYDVPDYA (SEQ ID NO: 586) |

[0165] In some embodiments, a CAG-repeat targeting dCas13d protein of the disclosure comprises from N-terminal to C-terminal: dCas13d (dSeq212), a linker, an SV-40 NLS, a linker, and an HA tag. In some embodiments, a dCas13d protein of the disclosure comprises from N-terminal to C-terminal: dCas13d (dSeq212), a linker, an SV-40 NLS, and a linker. In some aspects, the CAG-repeat targeting dCas13d protein of the disclosure is set forth in Table C. In some aspects, the CAG-repeat targeting dCas13d protein is used for methods of blocking CAG-repeat RNA sequence expression.

TABLE C
CAG-repeat targeting dCas13d protein

| Plasmid Element | Amino Acid Sequences |
|---|---|
| Dead Seq212 | KKKHQSAAEKRQVKKLKNQEKAQKYASEPSPLQSDTAGVECSQKKTVVS |
| | HIASSKTLAKAMGLKSTLVMGDKLVITSFAASKAVGGAGYKSANIEKITDL |
| | QGRVIEEHERMFSADVGEKNIELSKNDCHTNVNNPVVTNIGKDYIGLKSRL |
| | EQEFFGKTFENDNLHVQLAYNILDIKKILGTYVNNIIYIFYNLNRAGTGRDE |
| | RMYDDLIGTLYAYKPMEAQQTYLLKGDKDMRRFEEVKQLLQNTSAYYVY |
| | YGTLFEKVKAKSKKEQRAKEAEIDACTAHNYDVLRLLSLMRQLCMHSVA |
| | GTAFKLAESALFNIEDVLSADLKEILDEAFSGAVNKLNDGFVQHSGNNLYV |
| | LQQLYPNETIERIAEKYYRLTVRKEDLNMGVNIKKLRELIVGQYFPEVLDK |
| | EYDLSKNGDSVVTYRSKIYTVMNYILLYYLEDHDSSRESMVEALRQNREG |
| | DEGKEEIYRQFAKKVWNGVSGLFGVCLNLFKTEKRNKFRSKVALPDVSGA |
| | AYMLSSENIDYFVKMLFFVCKFLDGKEINELLCALINKFDNIADILDAAAQC |
| | GSSVWFVDSYRFFERSRRISAQIRIVKNIASKDFKKSKKDSDESYPEQLYLD |
| | ALALLGDVISKYKQNRDGSVVIDDQGNAVLTEQYKRFRYEFFEEIKRDESG |
| | GIKYKKSGKPEYNHQRRNFILNNVLKSKWFFYVVKYNRPSSCRELMKNKE |
| | ILRFVLRDIPDSQVRRYFKAVQGEEAYASAEAMRTRLVDALSQFSVTACLD |
| | EVGGMTDKEFASQRAVDSKEKLRAIIRLYLTVAYLITKSMVKVNTRFSIAF |
| | SVLERDYYLLIDGKKKSSDYTGEDMLALTRKFVGEDAGLYREWKEKNAE |
| | AKDKYFDKAERKKVLRQNDKMIRKMHFTPHSLNYVQKNLESVQSNGLAA |
| | VIKEYANAVAHLNIINRLDEYIGSARADSYYSLYCYCLQMYLSKNFSVGYL |
| | INVQKQLEEHHTYMKDLMWLLNIPFAYNLARYKNLSNEKLFYDEEAAAE |
| | KADKAENERGE (SEQ ID NO: 590) |
| Linker | GS |
| SV-40 NLS | PKKKRKV (SEQ ID NO: 437) |
| Linker | ED |
| HA Tag | YPYDVPDYA (SEQ ID NO: 586). |

CAG-repeat targeting dCas 13d protein

| Plasmid Element | Amino Acid Sequences |
|---|---|
| Dead Seq212 | KKKHQSAAEKRQVKKLKNQEKAQKYASEPSPLQSDTAGVECSQKKTVVS |
| | HIASSKTLAKAMGLKSTLVMGDKLVITSFAASKAVGGAGYKSANIEKITDL |
| | QGRVIEEHERMFSADVGEKNIELSKNDCHTNVNNPVVTNIGKDYIGLKSRL |
| | EQEFFGKTFENDNLHVQLAYNILDIKKILGTYVNNIIYIFYNLNRAGTGRDE |
| | RMYDDLIGTLYAYKPMEAQQTYLLKGDKDMRRFEEVKQLLQNTSAYYVY |
| | YGTLFEKVKAKSKKEQRAKEAEIDACTAHNYDVLRLLSLMRQLCMHSVA |
| | GTAFKLAESALFNIEDVLSADLKEILDEAFSGAVNKLNDGFVQHSGNNLYV |
| | LQQLYPNETIERIAEKYYRLTVRKEDLNMGVNIKKLRELIVGQYFPEVLDK |
| | EYDLSKNGDSVVTYRSKIYTVMNYILLYYLEDHDSSRESMVEALRQNREG |
| | DEGKEEIYRQFAKKVWNGVSGLFGVCLNLFKTEKRNKFRSKVALPDVSGA |
| | AYMLSSENIDYFVKMLFFVCKFLDGKEINELLCALINKFDNIADILDAAAQC |
| | GSSVWFVDSYRFFERSRRISAQIRIVKNIASKDFKKSKKDSDESYPEQLYLD |
| | ALALLGDVISKYKQNRDGSVVIDDQGNAVLTEQYKRFRYEFFEEIKRDESG |
| | GIKYKKSGKPEYNHQRRNFILNNVLKSKWFFYVVKYNRPSSCRELMKNKE |
| | ILRFVLRDIPDSQVRRYFKAVQGEEAYASAEAMRTRLVDALSQFSVTACLD |
| | EVGGMTDKEFASQRAVDSKEKLRAIIRLYLTVAYLITKSMVKVNTRFSIAF |
| | SVLERDYYLLIDGKKKSSDYTGEDMLALTRKFVGEDAGLYREWKEKNAE |
| | AKDKYFDKAERKKVLRQNDKMIRKMHFTPHSLNYVQKNLESVQSNGLAA |
| | VIKEYANAVAHLNIINRLDEYIGSARADSYYSLYCYCLQMYLSKNFSVGYL |
| | INVQKQLEEHHTYMKDLMWLLNIPFAYNLARYKNLSNEKLFYDEEAAAE |
| | KADKAENERGE (SEQ ID NO: 591) |
| Linker | GS |
| SV-40 NLS | PKKKRKV (SEQ ID NO: 437) |
| Linker | ED |
| HA Tag | YPYDVPDYA (SEQ ID NO: 586) |

CAG-repeat targeting dCas13d protein

| Plasmid Element | Amino Acid Sequences |
|---|---|
| Dead Seq212 | KKKHQSAAEKRQVKKLKNQEKAQKYASEPSPLQSDTAGVECSQKKTVVS |
| | HIASSKTLAKAMGLKSTLVMGDKLVITSFAASKAVGGAGYKSANIEKITDL |
| | QGRVIEEHERMFSADVGEKNIELSKNDCHTNVNNPVVTNIGKDYIGLKSRL |
| | EQEFFGKTFENDNLHVQLAYNILDIKKILGTYVNNIIYIFYNLNRAGTGRDE |
| | RMYDDLIGTLYAYKPMEAQQTYLLKGDKDMRRFEEVKQLLQNTSAYYVY |
| | YGTLFEKVKAKSKKEQRAKEAEIDACTAHNYDVLRLLSLMRQLCMASVA |
| | GTAFKLAESALFNIEDVLSADLKEILDEAFSGAVNKLNDGFVQHSGNNLYV |
| | LQQLYPNETIERIAEKYYRLTVRKEDLNMGVNIKKLRELIVGQYFPEVLDK |
| | EYDLSKNGDSVVTYRSKIYTVMNYILLYYLEDHDSSRESMVEALRQNREG |
| | DEGKEEIYRQFAKKVWNGVSGLFGVCLNLFKTEKRNKFRSKVALPDVSGA |
| | AYMLSSENIDYFVKMLFFVCKFLDGKEINELLCALINKFDNIADILDAAAQC |
| | GSSVWFVDSYRFFERSRRISAQIRIVKNIASKDFKKSKKDSDESYPEQLYLD |
| | ALALLGDVISKYKQNRDGSVVIDDQGNAVLTEQYKRFRYEFFEEIKRDESG |
| | GIKYKKSGKPEYNHQRRNFILNNVLKSKWFFYVVKYNRPSSCRELMKNKE |
| | ILRFVLRDIPDSQVRRYFKAVQGEEAYASAEAMRTRLVDALSQFSVTACLD |
| | EVGGMTDKEFASQRAVDSKEKLRAIIRLYLTVAYLITKSMVKVNTRFSIAF |
| | SVLERDYYLLIDGKKKSSDYTGEDMLALTRKFVGEDAGLYREWKEKNAE |
| | AKDKYFDKAERKKVLRQNDKMIRKMHFTPHSLNYVQKNLESVQSNGLAA |
| | VIKEYRNAVAHLNIINRLDEYIGSARADSYYSLYCYCLQMYLSKNFSVGYL |
| | INVQKQLEEHHTYMKDLMWLLNIPFAYNLARYKNLSNEKLFYDEEAAAE |
| | KADKAENERGE (SEQ ID NO: 592) |
| Linker | GS |
| SV-40 NLS | PKKKRKV (SEQ ID NO: 437) |
| Linker | ED |
| HA Tag | YPYDVPDYA (SEQ ID NO: 586) |

CAG-repeat targeting dCas13d protein

| Plasmid Element | Amino Acid Sequences |
|---|---|
| Dead Seq212 | KKKHQSAAEKRQVKKLKNQEKAQKYASEPSPLQSDTAGVECSQKKTVVS |
| | HIASSKTLAKAMGLKSTLVMGDKLVITSFAASKAVGGAGYKSANIEKITDL |
| | QGRVIEEHERMFSADVGEKNIELSKNDCHTNVNNPVVTNIGKDYIGLKSRL |
| | EQEFFGKTFENDNLHVQLAYNILDIKKILGTYVNNIIYIFYNLNRAGTGRDE |
| | RMYDDLIGTLYAYKPMEAQQTYLLKGDKDMRRFEEVKQLLQNTSAYYVY |
| | YGTLFEKVKAKSKKEQRAKEAEIDACTAHNYDVLRLLSLMAQLCMHSVA |
| | GTAFKLAESALFNIEDVLSADLKEILDEAFSGAVNKLNDGFVQHSGNNLYV |
| | LQQLYPNETIERIAEKYYRLTVRKEDLNMGVNIKKLRELIVGQYFPEVLDK |
| | EYDLSKNGDSVVTYRSKIYTVMNYILLYYLEDHDSSRESMVEALRQNREG |
| | DEGKEEIYRQFAKKVWNGVSGLFGVCLNLFKTEKRNKFRSKVALPDVSGA |
| | AYMLSSENIDYFVKMLFFVCKFLDGKEINELLCALINKFDNIADILDAAAQC |
| | GSSVWFVDSYRFFERSRRISAQIRIVKNIASKDFKKSKKDSDESYPEQLYLD |
| | ALALLGDVISKYKQNRDGSVVIDDQGNAVLTEQYKRFRYEFFEEIKRDESG |
| | GIKYKKSGKPEYNHQRRNFILNNVLKSKWFFYVVKYNRPSSCRELMKNKE |
| | ILRFVLRDIPDSQVRRYFKAVQGEEAYASAEAMRTRLVDALSQFSVTACLD |
| | EVGGMTDKEFASQRAVDSKEKLRAIIRLYLTVAYLITKSMVKVNTRFSIAF |
| | SVLERDYYLLIDGKKKSSDYTGEDMLALTRKFVGEDAGLYREWKEKNAE |
| | AKDKYFDKAERKKVLRQNDKMIRKMHFTPHSLNYVQKNLESVQSNGLAA |
| | VIKEYRNAVAHLNIINRLDEYIGSARADSYYSLYCYCLQMYLSKNFSVGYL |
| | INVQKQLEEHHTYMKDLMWLLNIPFAYNLARYKNLSNEKLFYDEEAAAE |
| | KADKAENERGE (SEQ ID NO: 593) |
| Linker | GS |
| SV-40 NLS | PKKKRKV (SEQ ID NO: 437) |
| Linker | ED |
| HA Tag | YPYDVPDYA (SEQ ID NO: 586) |

CAG-repeat targeting dCas13d protein

| Plasmid Element | Amino Acid Sequences |
|---|---|
| Dead Seq212 | KKKHQSAAEKRQVKKLKNQEKAQKYASEPSPLQSDTAGVECSQKKTVVS |
| | HIASSKTLAKAMGLKSTLVMGDKLVITSFAASKAVGGAGYKSANIEKITDL |
| | QGRVIEEHERMFSADVGEKNIELSKNDCHTNVNNPVVTNIGKDYIGLKSRL |
| | EQEFFGKTFENDNLHVQLAYNILDIKKILGTYVNNIIYIFYNLNRAGTGRDE |
| | RMYDDLIGTLYAYKPMEAQQTYLLKGDKDMRRFEEVKQLLQNTSAYYVY |
| | YGTLFEKVKAKSKKEQRAKEAEIDACTAHNYDVLRLLSLMRQLCMHSVA |
| | GTAFKLAESALFNIEDVLSADLKEILDEAFSGAVNKLNDGFVQHSGNNLYV |
| | LQQLYPNETIERIAEKYYRLTVRKEDLNMGVNIKKLRELIVGQYFPEVLDK |
| | EYDLSKNGDSVVTYRSKIYTVMNYILLYYLEDHDSSRESMVEALRQNREG |
| | DEGKEEIYRQFAKKVWNGVSGLFGVCLNLFKTEKRNKFRSKVALPDVSGA |
| | AYMLSSENIDYFVKMLFFVCKFLDGKEINELLCALINKFDNIADILDAAAQC |
| | GSSVWFVDSYRFFERSRRISAQIRIVKNIASKDFKKSKKDSDESYPEQLYLD |
| | ALALLGDVISKYKQNRDGSVVIDDQGNAVLTEQYKRFRYEFFEEIKRDESG |
| | GIKYKKSGKPEYNHQRRNFILNNVLKSKWFFYVVKYNRPSSCRELMKNKE |
| | ILRFVLRDIPDSQVRRYFKAVQGEEAYASAEAMRTRLVDALSQFSVTACLD |
| | EVGGMTDKEFASQRAVDSKEKLRAIIRLYLTVAYLITKSMVKVNTRFSIAF |
| | SVLERDYYLLIDGKKKSSDYTGEDMLALTRKFVGEDAGLYREWKEKNAE |
| | AKDKYFDKAERKKVLRQNDKMIRKMHFTPHSLNYVQKNLESVQSNGLAA |
| | VIKEYRNAVAHLNIINRLDEYIGSARADSYYSLYCYCLQMYLSKNFSVGYL |
| | INVQKQLEEHHTYMKDLMWLLNIPFAYNLARYANLSNEKLFYDEEAAAE |
| | KADKAENERGE (SEQ ID NO: 594) |
| Linker | GS |
| SV-40 NLS | PKKKRKV (SEQ ID NO: 437) |
| Linker | ED |
| HA Tag | YPYDVPDYA (SEQ ID NO: 586) |

[0166] In some embodiments, a CAG-repeat targeting dCas13d fusion protein of the disclosure comprises from N-terminal to C-terminal: an SV-40 NLS sequence, dCas13d (dSeq212) sequence, a linker sequence, an SV-40 NLS, a ZC3HT2A endonuclease (E17), a linker sequence, and a myc tag. In some embodiments, a CAG-repeat targeting dCas13d fusion protein of the disclosure comprises from N-terminal to C-terminal: an SV-40 NLS sequence, dCas13d (dSeq212) sequence, a linker sequence, an SV-40 NLS, and a ZC3H12A endonuclease (E17). In some aspects, the CAG-repeat targeting dCas13d protein of the disclosure is set forth in Table D. In some aspects, the CAG-repeat targeting dCas13d protein is used for methods of binding and cleaving CAG-repeat RNA sequences.

TABLE D
CAG-repeat targeting dCas13d protein

| Plasmid Element | Amino Acid Sequences |
|---|---|
| SV-40 NLS | PKKKRKV (SEQ ID NO: 437) |
| Linker | GGS |
| Dead Seq212 | KKKHQSAAEKRQVKKLKNQEKAQKYASEPSPLQSDTAGVECSQKKTVVS |
| | HIASSKTLAKAMGLKSTLVMGDKLVITSFAASKAVGGAGYKSANIEKITDL |
| | QGRVIEEHERMFSADVGEKNIELSKNDCHTNVNNPVVTNIGKDYIGLKSRL |
| | EQEFFGKTFENDNLHVQLAYNILDIKKILGTYVNNIIYIFYNLNRAGTGRDE |
| | RMYDDLIGTLYAYKPMEAQQTYLLKGDKDMRRFEEVKQLLQNTSAYYVY |
| | YGTLFEKVKAKSKKEQRAKEAEIDACTAHNYDVLRLLSLMRQLCMHSVA |
| | GTAFKLAESALFNIEDVLSADLKEILDEAFSGAVNKLNDGFVQHSGNNLYV |
| | LQQLYPNETIERIAEKYYRLTVRKEDLNMGVNIKKLRELIVGQYFPEVLDK |
| | EYDLSKNGDSVVTYRSKIYTVMNYILLYYLEDHDSSRESMVEALRQNREG |
| | DEGKEEIYRQFAKKVWNGVSGLFGVCLNLFKTEKRNKFRSKVALPDVSGA |
| | AYMLSSENIDYFVKMLFFVCKFLDGKEINELLCALINKFDNIADILDAAAQC |
| | GSSVWFVDSYRFFERSRRISAQIRIVKNIASKDFKKSKKDSDESYPEQLYLD |
| | ALALLGDVISKYKQNRDGSVVIDDQGNAVLTEQYKRFRYEFFEEIKRDESG |
| | GIKYKKSGKPEYNHQRRNFILNNVLKSKWFFYVVKYNRPSSCRELMKNKE |
| | ILRFVLRDIPDSQVRRYFKAVQGEEAYASAEAMRTRLVDALSQFSVTACLD |
| | EVGGMTDKEFASQRAVDSKEKLRAIIRLYLTVAYLITKSMVKVNTRFSIAF |
| | SVLERDYYLLIDGKKKSSDYTGEDMLALTRKFVGEDAGLYREWKEKNAE |
| | AKDKYFDKAERKKVLRQNDKMIRKMHFTPHSLNYVQKNLESVQSNGLAA |
| | VIKEYRNAVAALNIINRLDEYIGSARADSYYSLYCYCLQMYLSKNFSVGYL |
| | INVQKQLEEHHTYMKDLMWLLNIPFAYNLARYKNLSNEKLFYDEEAAAE |
| | KADKAENERGE (SEQ ID NO: 587) |
| Linker | GGGGSGGGGSGGGGS (SEQ ID NO: 415) |
| E17 | GGGTPKAPNLEPPLPEEEKEGSDLRPVVIDGSNVAMSHGNKEVFSCRGILL |
| | AVNWFLERGHTDITVFVPSWRKEQPRPDVPITDQHILRELEKKKILVFTPSR |
| | RVGGKRVVCYDDRFIVKLAYESDGIVVSNDTYRDLQGERQEWKRFIEERL |
| | LMYSFVNDKFMPPDDPLGRHGPSLDNFLRKKPLTLE (SEQ ID NO: 358) |
| Linker | GGS |
| Myc Tag | EQKLISEEDL (SEQ ID NO: 595) |

[0167] In some embodiments, a CAG-repeat targeting dCas13d fusion protein of the disclosure comprises from N-terminal to C-terminal: an SV-40 NLS sequence, a linker sequence, a dCas13d (dSeq212) sequence, a linker sequence, a ZC3H12A endonuclease (E17), a linker sequence, and a myc tag. In some embodiments, a CAG-repeat targeting dCas13d fusion protein of the disclosure comprises from N-terminal to C-terminal: an SV-40 NLS sequence, a linker sequence, a dCas13d (dSeq212) sequence, a linker sequence, and a ZC3H12A endonuclease (E17). In some aspects, the CAG-repeat targeting dCas13d protein of the disclosure is set forth in Table E. In some aspects, the CAG-repeat targeting dCas13d protein is used for methods of binding and cleaving CAG-repeat RNA sequences.

TABLE 3
CAG-repeat targeting dCas13d protein

| Plasmid Element | Amino Acid Sequences |
|---|---|
| SV-40 NLS | PKKKRKV |
| Linker | GGS |
| Dead Seq212 | KKKHQSAAEKRQVKKLKNQEKAQKYASEPSPLQSDTAGVECSQKKTVVS |
| | HIASSKTLAKAMGLKSTLVMGDKLVITSFAASKAVGGAGYKSANIEKITDL |
| | QGRVIEEHERMFSADVGEKNIELSKNDCHTNVNNPVVTNIGKDYIGLKSRL |
| | EQEFFGKTFENDNLHVQLAYNILDIKKILGTYVNNIIYIFYNLNRAGTGRDE |
| | RMYDDLIGTLYAYKPMEAQQTYLLKGDKDMRRFEEVKQLLQNTSAYYVY |
| | YGTLFEKVKAKSKKEQRAKEAEIDACTAHNYDVLRLLSLMAQLCMASVA |
| | GTAFKLAESALFNIEDVLSADLKEILDEAFSGAVNKLNDGFVQHSGNNLYV |
| | LQQLYPNETIERIAEKYYRLTVRKEDLNMGVNIKKLRELIVGQYFPEVLDK |
| | EYDLSKNGDSVVTYRSKIYTVMNYILLYYLEDHDSSRESMVEALRQNREG |
| | DEGKEEIYRQFAKKVWNGVSGLFGVCLNLFKTEKRNKFRSKVALPDVSGA |
| | AYMLSSENIDYFVKMLFFVCKFLDGKEINELLCALINKFDNIADILDAAAQC |
| | GSSVWFVDSYRFFERSRRISAQIRIVKNIASKDFKKSKKDSDESYPEQLYLD |
| | ALALLGDVISKYKQNRDGSVVIDDQGNAVLTEQYKRFRYEFFEEIKRDESG |
| | GIKYKKSGKPEYNHQRRNFILNNVLKSKWFFYVVKYNRPSSCRELMKNKE |
| | ILRFVLRDIPDSQVRRYFKAVQGEEAYASAEAMRTRLVDALSQFSVTACLD |
| | EVGGMTDKEFASQRAVDSKEKLRAIIRLYLTVAYLITKSMVKVNTRFSIAF |
| | SVLERDYYLLIDGKKKSSDYTGEDMLALTRKFVGEDAGLYREWKEKNAE |
| | AKDKYFDKAERKKVLRQNDKMIRKMHFTPHSLNYVQKNLESVQSNGLAA |
| | VIKEYANAVAALNIINRLDEYIGSARADSYYSLYCYCLQMYLSKNFSVGYL |
| | INVQKQLEEHHTYMKDLMWLLNIPFAYNLARYKNLSNEKLFYDEEAAAE |
| | KADKAENERGE (SEQ ID NO: 590) |
| Linker | GGGGSGGGGSGGGGS (SEQ ID NO: 415) |
| E17 | GGGTPKAPNLEPPLPEEEKEGSDLRPVVIDGSNVAMSHGNKEVFSCRGILL |
| | AVNWFLERGHTDITVFVPSWRKEQPRPDVPITDQHILRELEKKKILVFTPSR |
| | RVGGKRVVCYDDRFIVKLAYESDGIVVSNDTYRDLQGERQEWKRFIEERL |
| | LMYSFVNDKFMPPDDPLGRHGPSLDNFLRKKPLTLE (SEQ ID NO: 358) |
| Linker | GGS |
| Myc Tag | EQKLISEEDL (SEQ ID NO: 595) |

[0168] In some embodiments, a CAG-repeat targeting dCas13d fusion protein of the disclosure comprises from N-terminal to C-terminal: a ZC3H12A endonuclease (E17), a linker sequence, a dCas13d (dSeq212) sequence, a linker sequence, an SV-40 NLS, a linker sequence, and an HA tag. In some embodiments, a CAG-repeat targeting dCas13d fusion protein of the disclosure comprises from N-terminal to C-terminal: a ZC3H12A endonuclease (E17), a linker sequence, a dCas13d (dSeq212) sequence, a linker sequence, and an SV-40 NLS. In some aspects, the CAG-repeat targeting dCas13d protein of the disclosure is set forth in Table F. In some aspects, the CAG-repeat targeting dCas13d protein is used for methods of binding and cleaving CAG-repeat RNA sequences.

TABLE F
CAG-repeat targeting dCas13d protein

| Plasmid Element | Amino Acid Sequences |
|---|---|
| E17 | GGGTPKAPNLEPPLPEEEKEGSDLRPVVIDGSNVAMSHGNKEVFSCRGILL |
| | AVNWFLERGHTDITVFVPSWRKEQPRPDVPITDQHILRELEKKKILVFTPSR |
| | RVGGKRVVCYDDRFIVKLAYESDGIVVSNDTYRDLQGERQEWKRFIEERL |
| | LMYSFVNDKFMPPDDPLGRHGPSLDNFLRKKPLTLE (SEQ ID NO: 358) |
| Linker | GGGGSGGGGSGGGGS (SEQ ID NO: 415) |
| Dead Seq212 | KKKHQSAAEKRQVKKLKNQEKAQKYASEPSPLQSDTAGVECSQKKTVVS |
| | HIASSKTLAKAMGLKSTLVMGDKLVITSFAASKAVGGAGYKSANIEKITDL |
| | QGRVIEEHERMFSADVGEKNIELSKNDCHTNVNNPVVTNIGKDYIGLKSRL |
| | EQEFFGKTFENDNLHVQLAYNILDIKKILGTYVNNIIYIFYNLNRAGTGRDE |
| | RMYDDLIGTLYAYKPMEAQQTYLLKGDKDMRRFEEVKQLLQNTSAYYVY |
| | YGTLFEKVKAKSKKEQRAKEAEIDACTAHNYDVLRLLSLMAQLCMASVA |
| | GTAFKLAESALFNIEDVLSADLKEILDEAFSGAVNKLNDGFVQHSGNNLYV |
| | LQQLYPNETIERIAEKYYRLTVRKEDLNMGVNIKKLRELIVGQYFPEVLDK |
| | EYDLSKNGDSVVTYRSKIYTVMNYILLYYLEDHDSSRESMVEALRQNREG |
| | DEGKEEIYRQFAKKVWNGVSGLFGVCLNLFKTEKRNKFRSKVALPDVSGA |
| | AYMLSSENIDYFVKMLFFVCKFLDGKEINELLCALINKFDNIADILDAAAQC |
| | GSSVWFVDSYRFFERSRRISAQIRIVKNIASKDFKKSKKDSDESYPEQLYLD |
| | ALALLGDVISKYKQNRDGSVVIDDQGNAVLTEQYKRFRYEFFEEIKRDESG |
| | GIKYKKSGKPEYNHQRRNFILNNVLKSKWFFYVVKYNRPSSCRELMKNKE |
| | ILRFVLRDIPDSQVRRYFKAVQGEEAYASAEAMRTRLVDALSQFSVTACLD |
| | EVGGMTDKEFASQRAVDSKEKLRAIIRLYLTVAYLITKSMVKVNTRFSIAF |
| | SVLERDYYLLIDGKKKSSDYTGEDMLALTRKFVGEDAGLYREWKEKNAE |
| | AKDKYFDKAERKKVLRQNDKMIRKMHFTPHSLNYVQKNLESVQSNGLAA |
| | VIKEYANAVAALNIINRLDEYIGSARADSYYSLYCYCLQMYLSKNFSVGYL |
| | INVQKQLEEHHTYMKDLMWLLNIPFAYNLARYKNLSNEKLFYDEEAAAE |
| | KADKAENERGE (SEQ ID NO: 590) |
| Linker | GS |
| SV40 NLS | PKKKRKV (SEQ ID NO: 437) |
| Linker | ED |
| HA Tag | YPYDVPDYA (SEQ ID NO: 586) |

### Non-Guided CAG-Repeat RNA Binding Systems

[0169] In some embodiments, the RNA-binding system for targeting CAG toxic repeats does not comprise an RNA-guided RNA-binding polypeptide. In some embodiments, the RNA-binding system is comprised of a non-RNA-guided RNA-binding polypeptide. In some embodiments, the RNA-binding system is comprised of a non-RNA-guided RNA-binding polypeptide such as a PUF protein or a PUMBY protein, or RNA-binding portion thereof. In one embodiment, a non-guided RNA-binding fusion protein disclosed herein comprises a) a PUF or PUMBY RNA-binding sequence capable of binding a toxic target CAG repeat RNA sequence comprising CAGCAGCA (SEQ ID NO: 453) or GCAGCAGC (SEQ ID NO: 476) and b) an endonuclease capable of cleaving the toxic target CAG repeat sequence. The target CAG repeat frame 1 (CAG-f1 in FIG. 1) is CAGCAGCA (SEQ ID NO: 453) and the target CAG repeat frame 2 (CAG-f2 in FIG. 1) is GCAGCAGC (SEQ ID NO: 476). In another embodiment, the target CAG repeat frame is CAG repeat frame 3 which is AGCAGCAG (SEQ ID NO: 472).

[0170] In another embodiment, the toxic target RNA sequence comprises a target RNA sequence selected from the group consisting of CAGCAGCAGCAGCA (SEQ ID NO: 454), CAGCAGCAGCAGCAG (SEQ ID NO: 455), CAGCAGCAGCAGCAGC (SEQ ID NO: 456), GCAGCAGCAGCAGC (SEQ ID NO: 477), GCAGCAGCAGCAGCA (SEQ ID NO: 478), GCAGCAGCAGCAGCAG (SEQ ID NO: 479), AGCAGCAGCAGCAG (SEQ ID NO: 473), AGCAGCAGCAGCAGC (SEQ ID NO: 474), and AGCAGCAGCAGCAGCA (SEQ ID NO: 475).

[0171] In one embodiment, the PUF or PUMBY RNA-binding fusion protein comprises a) PUF or PUMBY CAG-targeting protein and b) a nuclease domain of ZC3H12A, a zinc-finger endonuclease, (referred to as E17 herein). In some embodiments, the CAG-targeting PUF or PUMBY fusion protein is configured with the N-terminal to C-terminal orientation as follows:
[0172] PUF(CAG)-E17, wherein PUF(CAG) is a CAG targeting PUF;
[0173] E17-PUF(CAG);
[0174] PUMBY(CAG)-E17, wherein PUMBY(CAG) is a CAG targeting PUMBY; or
[0175] E17-PUMBY(CAG).

[0176] In some embodiments, the PUF or PUMBY fusion configurations include a linker between the PUF(CAG) or PUMBY(CAG) and the E17 nuclease domain. In one embodiment, the linker sequence is VDTANGS (SEQ ID NO: 411).

[0177] In some embodiments, the CAG-targeting PUF or PUMBY fusion protein comprising a linker is configured N-terminal to C-terminal as follows:
[0178] PUF(CAG)-linker-E17
[0179] E17-linker-PUF(CAG)
[0180] PUMBY(CAG)-linker-E17; or
[0181] E17-linker-PUMBY(CAG).

[0182] In one embodiment, the CAG-targeting PUF or PUMBY fusion protein configuration from N-terminal to C-terminal is the orientation PUF(CAG)-VDTANGS-E17 or PUMBY(CAG)-VDTANGS-E17. In another embodiment, the CAG-targeting PUF or PUMBY fusion protein configuration from N-terminal to C-terminal is the orientation E17-VDTANGS-PUF(CAG) or E17-VDTANGS-PUMBY(CAG).

[0183] In some embodiments, the PUF or PUMBY configurations include one or more signal sequences and/or tags such as FLAG, NLS, NES or a combination thereof. In one embodiment, the FLAG tag sequence is DYKDDDDK (SEQ ID NO: 436). In one embodiment, the NLS is a human NLS. In another embodiment, the human NLS is human pRB-NLS: KRSAEGSNPPKPLKKLR (SEQ ID NO: 442) or human RB-NLS (extended version): DRVLKRSAEGSNPPKPLKKLR (SEQ ID NO: 543).

[0184] In one embodiment, the configuration comprises two different tags and/or signal sequences. In another embodiment, the configuration comprises two or more signal sequences. In some embodiments, the signal(s) is located at the N-terminal. In some embodiments, the signal(s) is located at the C-terminal. In some embodiments, a signal(s) is located at the N-terminal and a signal(s) is located at the C-terminal. In one embodiment, the CAG-targeting PUF or PUMBY fusion protein comprising one or more signals and/or tags is configured N-terminal to C-terminal as follows:
[0185] FLAG-NLS-PUF(CAG)-linker-E17;
[0186] FLAG-NLS-PUMBY(CAG)-linker-E17;
[0187] NLS-PUF(CAG)-linker-E17; or
[0188] NLS-PUMBY(CAG)-linker-E17.

[0189] In one embodiment, the CAG-targeting PUF or PUMBY fusion protein comprising one or more tags is configured N-terminal to C-terminal as follows:
[0190] FLAG-NLS-PUF(CAG)-VDTANGS-E17;
[0191] FLAG-NLS-PUMBY(CAG)-VDTANGS-E17;
[0192] NLS-PUF(CAG)-VDTANGS-E17; or
[0193] NLS-PUMBY(CAG)-VDTANGS-E17
[0194] NLS-PUF(CAG)-VDTANGS-E17-NES.

TABLE 2
Exemplary 8PUF configuration for targeting CAG
MRE

| Protein | Target | |
|---|---|---|
| Type | Sequence | Amino Acid Sequence of PUF |
| 8PUF | CAGCAGCA | GRSRLLEDFRNNRYPNLQLREIAGHI |
| | (SEQ ID NO: | MEFSQDQHGSRFIQLKLERATPAERQ |
| | 453) - Frame | LVFNEILQAAYQLMVDVFGSYVIRKF |
| | 1 | FEFGSLEQKLALAERIRGHVLSLALQ |
| | | MYGSRVIEKALEFIPSDQQNEMVREL |
| | | DGHVLKCVKDQNGCYVVQKCIECV |
| | | QPQSLQFIIDAFKGQVFALSTHPYGSR |
| | | VIRRILEHCLPDQTLPILEELHQHTEQ |
| | | LVQDQYGSYVIEHVLEHGRPEDKSKI |
| | | VAEIRGNVLVLSQHKFACNVVQKCV |
| | | THASRTERAVLIDEVCTMNDGPHSA |
| | | LYTMMKDQYASYVVRKMIDVAEPG |
| | | QRKIVMHKIRPHIATLRKYTYGKHIL |
| | | AKLEKYYMKNGVDLG |
| | | (SEQ ID NO: 480) |
| 8PUF | GCAGCAGC | GRSRLLEDFRNNRYPNLQLREIAGHI |
| | (SEQ ID NO: | MEFSQDQHGSRFIRLKLERATPAERQ |
| | 476) - Frame | LVFNEILQAAYQLMVDVFGSYVIEKF |
| | 2 | FEFGSLEQKLALAERIRGHVLSLALQ |
| | | MYGCRVIQKALEFIPSDQQNEMVRE |
| | | LDGHVLKCVKDQNGSYVVRKCIECV |
| | | QPQSLQFIIDAFKGQVFALSTHPYGSR |
| | | VIERILEHCLPDQTLPILEELHQHTEQ |
| | | LVQDQYGCYVIQHVLEHGRPEDKSK |
| | | IVAEIRGNVLVLSQHKFASYVVRKCV |
| | | THASRTERAVLIDEVCTMNDGPHSA |
| | | LYTMMKDQYASYVVEKMIDVAEPG |
| | | QRKIVMHKIRPHIATLRKYTYGKHIL |
| | | AKLEKYYMKNGVDLG |
| | | (SEQ ID NO: 549) |
| 8PUF | GCAGCAGC | GRSRLLEDFRNNRYPNLQLREIAGHI |
| | (SEQ ID NO: | MEFSQDQHGSRFIRLKLERATPAERQ |
| | 476) - Frame | LVFNEILQAAYQLMVDVFGSYVIEKF |
| | 2 - R4 amino | FEFGSLEQKLALAERIRGHVLSLALQ |
| | acid 13 H | MYGCRVIQKALEFIPSDQQNEMVRE |
| | | LDGHVLKCVKDQNGSHVVRKCIECV |
| | | QPQSLQFIIDAFKGQVFALSTHPYGSR |
| | | VIERILEHCLPDQTLPILEELHQHTEQ |
| | | LVQDQYGCYVIQHVLEHGRPEDKSK |
| | | IVAEIRGNVLVLSQHKFASYVVRKCV |
| | | THASRTERAVLIDEVCTMNDGPHSA |
| | | LYTMMKDQYASYVVEKMIDVAEPG |
| | | QRKIVMHKIRPHIATLRKYTYGKHIL |
| | | AKLEKYYMKNGVDLG (SEQ ID NO: |
| | | 568) |
| 8PUF | AGCAGCAG | GRSRLLEDFRNNRYPNLQLREIAGHI |
| | (SEQ ID NO: | MEFSQDQHGSRFIELKLERATPAERQ |
| | 472) - Frame | LVFNEILQAAYQLMVDVFGCYVIQK |
| | 3 | FFEFGSLEQKLALAERIRGHVLSLAL |
| | | QMYGSYVIRKALEFIPSDQQNEMVR |
| | | ELDGHVLKCVKDQNGSYVVEKCIEC |
| | | VQPQSLQFIIDAFKGQVFALSTHPYG |
| | | CRVIQRILEHCLPDQTLPILEELHQHT |
| | | EQLVQDQYGSYVIRHVLEHGRPEDK |
| | | SKIVAEIRGNVLVLSQHKFASNVVEK |
| | | CVTHASRTERAVLIDEVCTMNDGPH |
| | | SALYTMMKDQYACYVVQKMIDVAE |
| | | PGQRKIVMHKIRPHIATLRKYTYGKH |
| | | ILAKLEKYYMKNGVDLG (SEQ ID |
| | | NO: 444) |

[0195] In one embodiment, the PUF(CAG) or PUMBY(CAG) fusion construct targets expanded CAG repeats, wherein the CAG repeats are CAG³⁶ or more. In another embodiment, the CAG repeats are CAG⁸⁰. In some aspects, CAG³⁶ or CAG⁸⁰ refers to 36 CAG repeats or 80 CAG repeats in the HTT or SCA1 gene. Any other number of CAG repeats are possible, including at least 1, 2, 3, 4, 5, 6, 7, 8, 9, 10, 15, 20, 25, 30, 35, 36, 37, 38, 39, 40, 41, 42, 43, 44, 45, 46, 47, 48, 49, 50, 55, 60, 65, 70, 75, 76, 77, 78, 79, 80, 81, 82, 83, 84, 85, 90, 95, 100, 105, 110, 115, 120 CAG repeats, or any other number of CAG repeats in between.

[0196] In one embodiment, the nucleic acid sequence encoding the PUF(CAG) or PUMBY(CAG) protein or fusion construct is operably linked to a promoter sequence for expression in a cell. In one embodiment, the promoter sequence is a truncated CAG (tCAG) promoter (FIG. 3A). In some embodiments, the promoter sequence comprises an enhancer sequence and/or an intron sequence. In one embodiment, the promoter is a EFS/UBB promoter. In some embodiments, the promoter sequence is a neuron-specific promoter.

[0197] In one embodiment, the nucleic acid encoding the Cas13d(CAG) or dCas13d(CAG) (dCas13d(CAG) with or without an endonuclease) is operably linked to a promoter sequence for expression in a cell (FIG. 3A-3C and FIG. 18A-18B). In one embodiment, the promoter sequence is an EFS promoter (FIG. 3C or FIG. 18A-18B). In one embodiment, the promoter is a EFS/UBB promoter (FIG. 18A-18B). In one embodiment, the promoter is a synapsin promoter (FIG. 18A-18B). In some embodiments, the promoter sequence comprises an enhancer sequence and/or an intron sequence. In some embodiments, the promoter sequence is a neuron-specific promoter.

[0198] In another embodiment, the PUF(CAG) or PUMBY(CAG) or Cas13d(CAG) or dCas13d(CAG) configurations are packaged in an AAV vector. In one embodiment, the AAV vector is an AAV9 vector. In another embodiment, the AAV vector is an AAVrh74 vector.

[0199] In another embodiment, the PUF(CAG) or PUMBY(CAG) configurations are packaged in an AAV vector. In one embodiment, the AAV vector is an AAV9 or AAVrh10 vector.

### Guide RNAs for RNA-Guided RNA-Binding Proteins

[0200] The terms guide RNA (gRNA) and single guide RNA (sgRNA) are used interchangeably throughout the disclosure.

[0201] Guide RNAs (gRNAs) of the disclosure may comprise of a spacer sequence and a “direct repeat” (DR) sequence. In some embodiments, a guide RNA is a single guide RNA (sgRNA) comprising a contiguous spacer sequence and DR sequence. In some embodiments, the spacer sequence and the DR sequence are not contiguous. In some embodiments, the gRNA comprises a DR sequence. DR sequences refer to the repetitive sequences in the CRISPR locus (naturally-occurring in a bacterial genome or plasmid) that are interspersed with the spacer sequences. It is well known that one would be able to infer the DR sequence of a corresponding (or cognate) Cas protein if the sequence of the associated CRISPR locus is known. In some embodiments, a guide RNA comprises a direct repeat (DR) sequence and a spacer sequence. In some embodiments, a sequence encoding a guide RNA or single guide RNA of the disclosure comprises or consists of a spacer sequence and a DR sequence, that are separated by a linker sequence. In some embodiments, the linker sequence may comprise or consist of 1, 2, 3, 4, 5, 6, 7, 8, 9, 10, 15, 20, 25, 30, 35, 40, 45, 50 or any number of nucleotides (nt) in between. In some embodiments, the linker sequence may comprise at least 1, 2, 3, 4, 5, 6, 7, 8, 9, 10, 15, 20, 25, 30, 35, 40, 45, 50 or any number of nucleotides in between. In some embodiments, the DR sequence is a Cas13d DR sequence.

[0202] In one embodiment, the gRNA that hybridizes with the one or more target RNA molecules in a Cas 13d-mediated manner includes one or more direct repeat (DR) sequences, one or more spacer sequences, such as, e.g., one or more sequences comprising an array of DR-spacer-DR-spacer. In one embodiment, a plurality of gRNAs are generated from a single array, wherein each gRNA can be different, for example target different RNAs or target multiple regions of a single RNA, or combinations thereof. In some embodiments, an isolated gRNA includes one or more direct repeat sequences, such as an unprocessed (e.g., about 36 nt) or processed DR (e.g., about 30 nt). In some embodiments, a gRNA can further include one or more spacer sequences specific for (e.g., is complementary to) the target RNA. In certain such embodiments, multiple polIII promoters can be used to drive multiple gRNAs, spacers and/or DRs. In one embodiment, a guide array comprises a DR (about 36 nt)-spacer (about 30 nt)-DR (about 36 nt)-spacer (about 30 nt).

[0203] Guide RNAs (gRNAs) of the disclosure may comprise non-naturally occurring nucleotides. In some embodiments, a guide RNA of the disclosure or a sequence encoding the guide RNA comprises or consists of modified or synthetic RNA nucleotides. Exemplary modified RNA nucleotides include, but are not limited to, pseudouridine (Ψ), dihydrouridine (D), inosine (I), and 7-methylguanosine (m7G), hypoxanthine, xanthine, xanthosine, 7-methylguanine, 5, 6-Dihydrouracil, 5-methylcytosine, 5-methylcytidine, 5-hydropxymethylcytosine, isoguanine, and isocytosine.

[0204] Guide RNAs (gRNAs) of the disclosure may bind modified RNA within a target sequence. Within a target sequence, guide RNAs (gRNAs) of the disclosure may bind modified or mutated (e.g., pathogenic) RNA. Exemplary epigenetically or post-transcriptionally modified RNA include, but are not limited to, 2′-O-Methylation (2′-OMe) (2′-O-methylation occurs on the oxygen of the free 2′-OH of the ribose moiety), N6-methyladenosine (m6A), and 5-methylcytosine (m5C).

[0205] In some embodiments of the compositions of the disclosure, a guide RNA of the disclosure comprises at least one sequence encoding a non-coding C/D box small nucleolar RNA (snoRNA) sequence. In some embodiments, the snoRNA sequence comprises at least one sequence that is complementary to the target RNA, wherein the target sequence of the RNA molecule comprises at least one 2′-OMe. In some embodiments, the snoRNA sequence comprises at least one sequence that is complementary to the target RNA, wherein the at least one sequence that is complementary to the target RNA comprises a box C motif (RUGAUGA) and a box D motif (CUGA).

[0206] Spacer sequences of the disclosure bind to the target sequence of an RNA molecule. In some embodiments, spacer sequences of the disclosure bind to pathogenic target RNA.

[0207] In some embodiments of the compositions of the disclosure, the sequence comprising the gRNA further comprises a spacer sequence that specifically binds to the target RNA sequence. In some embodiments, the spacer sequence has at least 50%, 55%, 60%, 65%, 70%, 75%, 80%, 87%, 90%, 95%, 97%, 99% or any percentage in between of complementarity to the target RNA sequence. In some embodiments, the spacer sequence has 100% complementarity to the target RNA sequence. In some embodiments, the spacer sequence comprises or consists of 20 nucleotides. In some embodiments, the spacer sequence comprises or consists of 21 nucleotides, 22 nucleotides, 23 nucleotides, 24 nucleotides, 25 nucleotides, 26 nucleotides, 27 nucleotides, 28 nucleotides, or 29 nucleotides. In some embodiments, the spacer sequence comprises or consists of 26 nucleotides. In some embodiments, the spacer sequence is non-processed and comprises or consists of 30 nucleotides. In some embodiments the non-processed spacer sequence comprises or consists of 30-36 nucleotides.

[0208] DR sequences of the disclosure bind the Cas polypeptide of the disclosure. Upon binding of the spacer sequence of the gRNA to the target RNA sequence, the Cas protein bound to the DR sequence of the gRNA is positioned at the target RNA sequence. A DR sequence having sufficient complementarity to its cognate Cas protein, or nucleic acid thereof, binds selectively to the target nucleic acid sequence of the Cas protein and has at least 50%, 55%, 60%, 65%, 70%, 75%, 80%, 85%, 90%, 95%, 96, 97%, 98%, 99%, or any percentage identity in between to the sequence. In some embodiments, a sequence having sufficient complementarity has 100% identity. In some embodiments, DR sequences of the disclosure comprise a secondary structure or a tertiary structure. Exemplary secondary structures include, but are not limited to, a helix, a stem loop, a bulge, a tetraloop and a pseudoknot. Exemplary tertiary structures include, but are not limited to, an A-form of a helix, a B-form of a helix, and a Z-form of a helix. Exemplary tertiary structures include, but are not limited to, a twisted or helicized stem loop. Exemplary tertiary structures include, but are not limited to, a twisted or helicized pseudoknot. In some embodiments, DR sequences of the disclosure comprise at least one secondary structure or at least one tertiary structure. In some embodiments, DR sequences of the disclosure comprise one or more secondary structure(s) or one or more tertiary structure(s).

[0209] In some embodiments of the compositions of the disclosure, a guide RNA or a portion thereof selectively binds to a tetraloop motif in an RNA molecule of the disclosure. In some embodiments, a target sequence of an RNA molecule comprises a tetraloop motif. In some embodiments, the tetraloop motif is a “GRNA” motif comprising or consisting of one or more of the sequences of GAAA, GUGA, GCAA or GAGA.

[0210] In some embodiments of the compositions of the disclosure, a guide RNA or a portion thereof that binds to a target sequence of an RNA molecule hybridizes to the target sequence of the RNA molecule. In some embodiments, a guide RNA or a portion thereof that binds to a first RNA binding protein or to a second RNA binding protein covalently binds to the first RNA binding protein or to the second RNA binding protein. In some embodiments, a guide RNA or a portion thereof that binds to a first RNA binding protein or to a second RNA binding protein non-covalently binds to the first RNA binding protein or to the second RNA binding protein.

[0211] In some embodiments of the compositions of the disclosure, a guide RNA or a portion thereof comprises or consists of between 10 and 100 nucleotides, inclusive of the endpoints. In some embodiments, a spacer sequence of the disclosure comprises or consists of between 10 and 30 nucleotides, inclusive of the endpoints. In some embodiments, a spacer sequence of the disclosure comprises or consists of 15, 16, 17, 18, 19, 20, 21, 22, 23, 24, 25, 26, 27, 28, 29 or 30 nucleotides. In some embodiments, the spacer sequence of the disclosure comprises or consists of 20 nucleotides. In some embodiments, the spacer sequence of the disclosure comprises or consists of 21 nucleotides. In some embodiments, the spacer sequence of the disclosure comprises or consists of 26 nucleotides.

[0212] Guide molecules generally exist in various states of processing. In one example, an unprocessed guide RNA is 36 nt of DR followed by 30-32 nt of spacer. The guide RNA is processed (truncated/modified) by Cas 13d itself or other RNases into the shorter “mature” form. In some embodiments, an unprocessed guide sequence is about, or at least about 30, 35, 40, 45, 50, 55, 60, 61, 62, 63, 64, 65, 66, 67, 68, 69, 70, 71, 72, 73, 74, 75, or more nucleotides (nt) in length. In some embodiments, a processed guide sequence is about 44 to 60 nt (such as 40, 41, 42, 43, 44, 45, 46, 47, 48, 49, 50, 51, 52, 53, 54, 55, 56, 57, 58, 59, 60, 61, 62, 63, 64, 65, 66, 67, 68, 69, or 70 nt). In some embodiments, an unprocessed spacer is about 28-32 nt long (such as 25, 26, 27, 28, 29, 30, 31, 32, 33, 34, or 35 nt) while the mature (processed) spacer can be about 10 to 30 nt, 10 to 25 nt, 14 to 25 nt, 20 to 22 nt, or 14-30 nt (such as 10, 11, 12, 13, 14, 15, 16, 17, 18, 19, 20, 21, 22, 23, 24, 25, 26, 27, 28, 29, 30, 31, 32, 33, 34, or 35 nt). In some embodiments, an unprocessed DR is about 36 nt (such as 30, 31, 32, 33, 34, 35, 36, 37, 38, 39, 40 or 41 nt), while the processed DR is about 30 nt (such as 25, 26, 27, 28, 29, 30, 31, 32, 33, 34, or 35 nt). In some embodiments, a DR sequence is truncated by 1-10 nucleotides (such as 1, 2, 3, 4, 5, 6, 7, 8, 9, to 10 nucleotides at e.g., the 5′ end in order to be expressed as mature pre-processed guide RNAs.

[0213] In some embodiments of the compositions of the disclosure, a guide RNA or a portion thereof does not comprise a nuclear localization sequence (NLS).

[0214] In some embodiments of the compositions of the disclosure, a guide RNA or a portion thereof comprises a sequence complementary to a protospacer flanking sequence (PFS). In some embodiments, including those wherein a guide RNA or a portion thereof comprises a sequence complementary to a PFS, the first RNA binding protein may comprise a sequence isolated or derived from a Cas13 protein. In some embodiments, including those wherein a guide RNA or a portion thereof comprises a sequence complementary to a PFS, the first RNA binding protein may comprise a sequence encoding a Cas13 protein or an RNA-binding portion thereof. In some embodiments, the guide RNA or a portion thereof does not comprise a sequence complementary to a PFS.

[0215] In some embodiments of the compositions of the disclosure, vectors comprising guide RNA sequences of the disclosure comprises a promoter sequence to drive expression of the guide RNA. In some embodiments, a vector comprising a guide RNA sequence of the disclosure comprises a promoter sequence to drive expression of the guide RNA. In some embodiments, the promoter to drive expression of the guide RNA is a constitutive promoter. In some embodiments, the promoter sequence is an inducible promoter. In some embodiments, the promoter is a sequence is a tissue-specific and/or cell-type specific promoter. In some embodiments, the promoter is a hybrid or a recombinant promoter. In some embodiments, the promoter is a promoter capable of expressing the guide RNA in a mammalian cell. In some embodiments, the promoter is a promoter capable of expressing the guide RNA in a human cell. In some embodiments, the promoter is a promoter capable of expressing the guide RNA and restricting the guide RNA to the nucleus of the cell. In some embodiments, the promoter is a human RNA polymerase promoter or a sequence isolated or derived from a sequence encoding a human RNA polymerase promoter. In some embodiments, the promoter is a U6 promoter or a sequence isolated or derived from a sequence encoding a U6 promoter. In some embodiments, the U6 promoter is a human U6 promoter. In some embodiments, the promoter is a human tRNA promoter or a sequence isolated or derived from a sequence encoding a human tRNA promoter. In some embodiments, the promoter is a human valine tRNA promoter or a sequence isolated or derived from a sequence encoding a human valine tRNA promoter.

[0216] In some embodiments of the compositions of the disclosure, a promoter to drive expression of the guide RNA further comprises a regulatory element. In some embodiments, a vector comprising a promoter sequence to drive expression of the guide RNA further comprises a regulatory element. In some embodiments, a regulatory element enhances expression of the guide RNA. Exemplary regulatory elements include, but are not limited to, an enhancer element, an intron, an exon, or a combination thereof.

[0217] In some embodiments of the compositions of the disclosure, a vector of the disclosure comprises one or more of a sequence encoding a guide RNA, a promoter sequence to drive expression of the guide RNA and a sequence encoding a regulatory element. In some embodiments of the compositions of the disclosure, the vector further comprises a sequence encoding a fusion protein of the disclosure.

### RNA-Guided RNA-Binding Proteins

[0218] In some embodiments of the compositions of the disclosure, gRNAs correspond to target RNA molecules and an RNA-guided RNA binding protein. In some embodiments, the gRNAs correspond to an RNA-guided RNA binding fusion protein, wherein the fusion protein comprises first and second RNA binding proteins. In some embodiments, the first RNA-binding protein in the fusion protein is a deactivated RNA-binding protein, e.g., a deactivated Cas or catalytic dead Cas protein. In some embodiments, along a sequence encoding the RNA-binding fusion protein, the sequence encoding the first RNA binding protein is positioned 5′ of the sequence encoding the second RNA binding protein. In some embodiments, along a sequence encoding the fusion protein, the sequence encoding the first RNA binding protein is positioned 3′ of the sequence encoding the second RNA binding protein.

[0219] In some embodiments of the compositions of the disclosure, the sequence encoding the first RNA binding protein comprises a sequence isolated or derived from a protein capable of binding an RNA molecule. In some embodiments, the sequence encoding the first RNA binding protein comprises a sequence isolated or derived from a protein capable of selectively binding an RNA molecule and not binding a DNA molecule, a mammalian DNA molecule or any DNA molecule. In some embodiments, the sequence encoding the first RNA binding protein comprises a sequence isolated or derived from a protein capable of binding an RNA molecule and inducing a break in the RNA molecule. In some embodiments, the sequence encoding the first RNA binding protein comprises a sequence isolated or derived from a protein capable of binding an RNA molecule, inducing a break in the RNA molecule, and not binding a DNA molecule, a mammalian DNA molecule or any DNA molecule. In some embodiments, the sequence encoding the first RNA binding protein comprises a sequence isolated or derived from a protein capable of binding an RNA molecule, inducing a break in the RNA molecule, and neither binding nor inducing a break in a DNA molecule, a mammalian DNA molecule or any DNA molecule.

[0220] In some embodiments of the compositions of the disclosure, the sequence encoding the first RNA-guided RNA binding protein comprises a sequence isolated or derived from a protein with no DNA nuclease activity.

[0221] In some embodiments of the compositions of the disclosure, the sequence encoding the RNA-guided RNA binding protein disclosed herein comprises a sequence isolated or derived from a CRISPR Cas protein. In some embodiments, the CRISPR Cas protein is not a Type II CRISPR Cas protein. In some embodiments, the CRISPR Cas protein is not a Cas9 protein.

[0222] In some embodiments of the compositions of the disclosure, the sequence encoding the RNA-guided RNA binding protein comprises a Type VI CRISPR Cas protein or portion thereof. In some embodiments, the Type VI CRISPR Cas protein comprises a Cas13 protein or portion thereof. Exemplary Cas13 proteins of the disclosure may be isolated or derived from any species, including, but not limited to, bacteria or archaea. Exemplary Cas13 proteins of the disclosure may be isolated or derived from any species, including, but not limited to, Leptotrichia wadei, Listeria seeligeri serovar 1/2b (strain ATCC 35967/DSM 20751/CIP 100100/SLCC 3954), Lachnospiraceae bacterium, Clostridium aminophilum DSM 10710, Carnobacterium gallinarum DSM 4847, Paludibacter propionicigenes WB4, Listeria weihenstephanensis FSL R9-0317, Listeria weihenstephanensis FSL R9-0317, bacterium FSL M6-0635 (Listeria newyorkensis), Leptotrichia wadei F0279, Rhodobacter capsulatus SB 1003, Rhodobacter capsulatus R121, Rhodobacter capsulatus DE442 and Corynebacterium ulcerans. Exemplary Cas13 proteins of the disclosure may be DNA nuclease inactivated. Exemplary Cas13 proteins of the disclosure include, but are not limited to, Cas13a, Cas13b, Cas13c, Cas13d and orthologs thereof. Exemplary Cas13b proteins of the disclosure include, but are not limited to, subtypes 1 and 2 referred to herein as Csx27 and Csx28, respectively.

[0223] Exemplary Cas13a proteins include, but are not limited to:

| Cas13a | Cas13a | | | |
|---|---|---|---|---|
| number | abbreviation | Organism name | Accession number | Direct Repeat sequence |
| Cas13a1 | LshCas13a | Leptotrichia | WP_018451595.1 | CCACCCCAATATCGAAGGGGACTAA |
| | | shahii | | AAC (SEQ ID NO: 393) |
| Cas13a2 | LwaCas13a | Leptotrichia | WP_021746774.1 | GATTTAGACTACCCCAAAAACGAAG |
| | | wadei | | GGGACTAAAAC (SEQ ID NO: |
| | | | | 394) |
| Cas13a3 | LseCas13a | Listeria seeligeri | WP_012985477.1 | GTAAGAGACTACCTCTATATGAAAG |
| | | | | AGGACTAAAAC (SEQ ID NO: |
| | | | | 395) |
| Cas13a4 | LbmCas13a | Lachnospiraceae | WP_044921188.1 | GTATTGAGAAAAGCCAGATATAGTT |
| | | bacterium | | GGCAATAGAC (SEQ ID NO: 396) |
| | | MA2020 | | |
| Cas13a5 | LbnCas13a | Lachnospiraceae | WP_022785443.1 | GTTGATGAGAAGAGCCCAAGATAG |
| | | bacterium | | AGGGCAATAAC (SEQ ID NO: |
| | | NK4A179 | | 397) |
| Cas13a6 | CamCas13a | [Clostridium] | WP_031473346.1 | GTCTATTGCCCTCTATATCGGGCTGT |
| | | aminophilum | | TCTCCAAAC (SEQ ID NO: 398) |
| | | DSM 10710 | | |
| Cas13a7 | CgaCas13a | Carnobacterium | WP_034560163.1 | ATTAAAGACTACCTCTAAATGTAAG |
| | | gallinarum DSM | | AGGACTATAAC (SEQ ID NO: |
| | | 4847 | | 399) |
| Cas13a8 | Cga2Cas13a | Carnobacterium | WP_034563842.1 | AATATAAACTACCTCTAAATGTAAG |
| | | gallinarum DSM | | AGGACTATAAC (SEQ ID NO: |
| | | 4847 | | 400) |
| Cas13a9 | Pprcas 13a | Paludibacter | WP_013443710.1 | CTTGTGGATTATCCCAAAATTGAAG |
| | | propionicigenes | | GGAACTACAAC (SEQ ID NO: |
| | | WB4 | | 401) |
| Cas13a10 | LweCas13a | Listeria | WP_036059185.1 | GATTTAGAGTACCTCAAAATAGAAG |
| | | weihenstephanensis | | AGGTCTAAAAC (SEQ ID NO: |
| | | FSL R9-0317 | | 402) |
| Cas13a11 | LbfCas13a | Listeriaceae | WP_036091002.1 | GATTTAGAGTACCTCAAAACAAAAG |
| | | bacterium FSL | | AGGACTAAAAC (SEQ ID NO: |
| | | M6-0635 | | 403) |
| | | (Listeria | | |
| | | newyorkensis) | | |
| Cas13a12 | Lwa2cas13a | Leptotrichia | WP_021746774.1 | GATATAGATAACCCCAAAAACGAA |
| | | wadei F0279 | | GGGATCTAAAAC (SEQ ID NO: |
| | | | | 404) |
| Cas13a13 | RcsCas13a | Rhodobacter | WP_013067728.1 | GCCTCACATCACCGCCAAGACGACG |
| | | capsulatus SB | | GCGGACTGAAC (SEQ ID NO: 405) |
| | | 1003 | | |
| Cas13a14 | RcrCas13a | Rhodobacter | WP_023911507.1 | GCCTCACATCACCGCCAAGACGACG |
| | | capsulatus R121 | | GCGGACTGAAC (SEQ ID NO: |
| | | | | 406) |
| Cas13a15 | RcdCas13a | Rhodobacter | WP_023911507.1 | GCCTCACATCACCGCCAAGACGACG |
| | | capsulatus | | GCGGACTGAAC (SEQ ID NO: |
| | | DE442 | | 407) |

[0224] Exemplary wild type Cas13a proteins of the disclosure may comprise or consist of the amino acid sequence of SEQ ID NO: 408.

[0225] Exemplary Cas13b proteins include, but are not limited to:

| | Cas13b | Cas13b |
|---|---|---|
| Species | Accession | Size (aa) |
| Paludibacter propionicigenes WB4 | WP_013446107.1 | 1155 |
| Prevotella sp. P5-60 | WP_044074780.1 | 1091 |
| Prevotella sp. P4-76 | WP_044072147.1 | 1091 |
| Prevotella sp. P5-125 | WP_044065294.1 | 1091 |
| Prevotella sp. P5-119 | WP_042518169.1 | 1091 |
| Capnocytophaga canimorsus Cc5 | WP_013997271.1 | 1200 |
| Phaeodactylibacter xiamenensis | WP_044218239.1 | 1132 |
| Porphyromonas gingivalis W83 | WP_005873511.1 | 1136 |
| Porphyromonas gingivalis F0570 | WP_021665475.1 | 1136 |
| Porphyromonas gingivalis ATCC 33277 | WP_012458151.1 | 1136 |
| Porphyromonas gingivalis F0185 | ERJ81987.1 | 1136 |
| Porphyromonas gingivalis F0185 | WP_021677657.1 | 1136 |
| Porphyromonas gingivalis SJD2 | WP_023846767.1 | 1136 |
| Porphyromonas gingivalis F0568 | ERJ65637.1 | 1136 |
| Porphyromonas gingivalis W4087 | ERJ87335.1 | 1136 |
| Porphyromonas gingivalis W4087 | WP_021680012.1 | 1136 |
| Porphyromonas gingivalis F0568 | WP_021663197.1 | 1136 |
| Porphyromonas gingivalis | WP_061156637.1 | 1136 |
| Porphyromonas gulae | WP_039445055.1 | 1136 |
| Bacteroides pyogenes F0041 | ERI81700.1 | 1116 |
| Bacteroides pyogenes JCM 10003 | WP_034542281.1 | 1116 |
| Alistipes sp. ZOR0009 | WP_047447901.1 | 954 |
| Flavobacterium branchiophilum FL-15 | WP_014084666.1 | 1151 |
| Prevotella sp. MA2016 | WP_036929175.1 | 1323 |
| Myroides odoratimimus CCUG 10230 | EHO06562.1 | 1160 |
| Myroides odoratimimus CCUG 3837 | EKB06014.1 | 1158 |
| Myroides odoratimimus CCUG 3837 | WP_006265509.1 | 1158 |
| Myroides odoratimimus CCUG 12901 | WP_006261414.1 | 1158 |
| Myroides odoratimimus CCUG 12901 | EHO08761.1 | 1158 |
| Myroides odoratimimus (NZ_CP013690.1) | WP_058700060.1 | 1160 |
| Bergeyella zoohelcum ATCC 43767 | EKB54193.1 | 1225 |
| Capnocytophaga cynodegmi | WP_041989581.1 | 1219 |
| Bergeyella zoohelcum ATCC 43767 | WP_002664492.1 | 1225 |
| Flavobacterium sp. 316 | WP_045968377.1 | 1156 |
| Psychroflexus torquis ATCC 700755 | WP_015024765.1 | 1146 |
| Flavobacterium columnare ATCC 49512 | WP_014165541.1 | 1180 |
| Flavobacterium columnare | WP_060381855.1 | 1214 |
| Flavobacterium columnare | WP_063744070.1 | 1214 |
| Flavobacterium columnare | WP_065213424.1 | 1215 |
| Chryseobacterium sp. YR477 | WP_047431796.1 | 1146 |
| Riemerella anatipestifer ATCC | WP_004919755.1 | 1096 |
| 11845 = DSM 15868 | | |
| Riemerella anatipestifer RA-CH-2 | WP_015345620.1 | 949 |
| Riemerella anatipestifer | WP_049354263.1 | 949 |
| Riemerella anatipestifer | WP_061710138.1 | 951 |
| Riemerella anatipestifer | WP_064970887.1 | 1096 |
| Prevotella saccharolytica F0055 | EKY00089.1 | 1151 |
| Prevotella saccharolytica JCM 17484 | WP_051522484.1 | 1152 |
| Prevotella buccae ATCC 33574 | EFU31981.1 | 1128 |
| Prevotella buccae ATCC 33574 | WP_004343973.1 | 1128 |
| Prevotella buccae D17 | WP_004343581.1 | 1128 |
| Prevotella sp. MSX73 | WP_007412163.1 | 1128 |
| Prevotella pallens ATCC 700821 | EGQ18444.1 | 1126 |
| Prevotella pallens ATCC 700821 | WP_006044833.1 | 1126 |
| Prevotella intermedia | WP_036860899.1 | 1127 |
| ATCC 25611 = DSM 20706 | | |
| Prevotella intermedia | WP_061868553.1 | 1121 |
| Prevotella intermedia 17 | AFJ07523.1 | 1135 |
| Prevotella intermedia | WP_050955369.1 | 1133 |
| Prevotella intermedia | BAU18623.1 | 1134 |
| Prevotella intermedia ZT | KJJ86756.1 | 1126 |
| Prevotella aurantiaca JCM 15754 | WP_025000926.1 | 1125 |
| Prevotella pleuritidis F0068 | WP_021584635.1 | 1140 |
| Prevotella pleuritidis JCM 14110 | WP_036931485.1 | 1117 |
| Prevotella falsenii DSM | WP_036884929.1 | 1134 |
| 22864 = JCM 15124 | | |
| Porphyromonas gulae | WP_039418912.1 | 1176 |
| Porphyromonas sp. COT-052 OH4946 | WP_039428968.1 | 1176 |
| Porphyromonas gulae | WP_039442171.1 | 1175 |
| Porphyromonas gulae | WP_039431778.1 | 1176 |
| Porphyromonas gulae | WP_046201018.1 | 1176 |
| Porphyromonas gulae | WP_039434803.1 | 1176 |
| Porphyromonas gulae | WP_039419792.1 | 1120 |
| Porphyromonas gulae | WP_039426176.1 | 1120 |
| Porphyromonas gulae | WP_039437199.1 | 1120 |
| Porphyromonas gingivalis TDC60 | WP_013816155.1 | 1120 |
| Porphyromonas gingivalis ATCC 33277 | WP_012458414.1 | 1120 |
| Porphyromonas gingivalis A7A1-28 | WP_058019250.1 | 1176 |
| Porphyromonas gingivalis JCVI SC001 | EOA10535.1 | 1176 |
| Porphyromonas gingivalis W50 | WP_005874195.1 | 1176 |
| Porphyromonas gingivalis | WP_052912312.1 | 1176 |
| Porphyromonas gingivalis AJW4 | WP_053444417.1 | 1120 |
| Porphyromonas gingivalis | WP_039417390.1 | 1120 |
| Porphyromonas gingivalis | WP_061156470.1 | 1120 |

[0226] Exemplary wild type Bergeyella zoohelcum ATCC 43767 Cas13b (BzCas13b) proteins of the disclosure may comprise or consist of the amino acid sequence of SEQ ID NO: 409.

[0227] In some embodiments of the compositions of the disclosure, the sequence encoding the RNA binding protein comprises a sequence isolated or derived from a Cas13d protein. Cas13d is an effector of the type VI-D CRISPR-Cas systems. In some embodiments, the Cas13d protein is an RNA-guided RNA endonuclease enzyme that can cut or bind RNA. In some embodiments, the Cas13d protein can include one or more higher eukaryotes and prokaryotes nucleotide-binding (HEPN) domains. In some embodiments, the Cas13d protein can include either a wild-type or mutated HEPN domain. In some embodiments, the Cas13d protein includes a mutated HEPN domain that cannot cut RNA but can process guide RNA. In some embodiments, the Cas13d protein does not require a protospacer flanking sequence. Also see WO Publication No. WO2019/040664 & US2019/0062724, which is incorporated herein by reference in its entirety, for further examples and sequences of Cas13d protein, without limitation.

[0228] In some embodiments, Cas13d sequences of the disclosure include without limitation SEQ ID NOS: 1-296 of WO 2019/040664, so numbered herein and included herewith.

[0229] SEQ ID NO: 1 is an exemplary Cas13d sequence from Eubacterium siraeum containing a HEPN site.

[0230] SEQ ID NO: 2 is an exemplary Cas13d sequence from Eubacterium siraeum containing a mutated HEPN site.

[0231] SEQ ID NO: 3 is an exemplary Cas13d sequence from uncultured Ruminococcus sp. containing a HEPN site.

[0232] SEQ ID NO: 4 is an exemplary Cas13d sequence from uncultured Ruminococcus sp. containing a mutated HEPN site.

[0233] SEQ ID NO: 5 is an exemplary Cas13d sequence from Gut_metagenome_contig2791000549.

[0234] SEQ ID NO: 6 is an exemplary Cas13d sequence from Gut_metagenome_contig855000317

[0235] SEQ ID NO: 7 is an exemplary Cas13d sequence from Gut_metagenome_contig3389000027.

[0236] SEQ ID NO: 8 is an exemplary Cas13d sequence from Gut_metagenome_contig8061000170.

[0237] SEQ ID NO: 9 is an exemplary Cas13d sequence from Gut_metagenome_contigl509000299.

[0238] SEQ ID NO: 10 is an exemplary Cas13d sequence from Gut_metagenome_contig9549000591.

[0239] SEQ ID NO: 11 is an exemplary Cas13d sequence from Gut_metagenome_contig71000500.

[0240] SEQ ID NO: 12 is an exemplary Cas13d sequence from human gut metagenome.

[0241] SEQ ID NO: 13 is an exemplary Cas13d sequence from Gut_metagenome_contig3915000357.

[0242] SEQ ID NO: 14 is an exemplary Cas13d sequence from Gut_metagenome_contig4719000173.

[0243] SEQ ID NO: 15 is an exemplary Cas13d sequence from Gut_metagenome_contig6929000468.

[0244] SEQ ID NO: 16 is an exemplary Cas13d sequence from Gut_metagenome_contig7367000486.

[0245] SEQ ID NO: 17 is an exemplary Cas13d sequence from Gut_metagenome_contig7930000403.

[0246] SEQ ID NO: 18 is an exemplary Cas13d sequence from Gut_metagenome_contig993000527.

[0247] SEQ ID NO: 19 is an exemplary Cas13d sequence from Gut_metagenome_contig6552000639.

[0248] SEQ ID NO: 20 is an exemplary Cas13d sequence from Gut_metagenome_contigl1932000246.

[0249] SEQ ID NO: 21 is an exemplary Cas13d sequence from Gut_metagenome_contigl2963000286.

[0250] SEQ ID NO: 22 is an exemplary Cas13d sequence from Gut_metagenome_contig2952000470.

[0251] SEQ ID NO: 23 is an exemplary Cas13d sequence from Gut_metagenome_contig451000394.

[0252] SEQ ID NO: 24 is an exemplary Cas13d sequence from Eubacterium_siraeum_DSM_15702.

[0253] SEQ ID NO: 25 is an exemplary Cas13d sequence from gut_metagenome_P19E0k2120140920,_c369000003.

[0254] SEQ ID NO: 26 is an exemplary Cas13d sequence from Gut_metagenome_contig7593000362.

[0255] SEQ ID NO: 27 is an exemplary Cas13d sequence from Gut_metagenome_contigl2619000055.

[0256] SEQ ID NO: 28 is an exemplary Cas13d sequence from Gut_metagenome_contigl405000151.

[0257] SEQ ID NO: 29 is an exemplary Cas13d sequence from Chicken_gut_metagenome_c298474.

[0258] SEQ ID NO: 30 is an exemplary Cas13d sequence from Gut_metagenome_contigl516000227.

[0259] SEQ ID NO: 31 is an exemplary Cas13d sequence from Gut_metagenome_contigl838000319.

[0260] SEQ ID NO: 32 is an exemplary Cas13d sequence from Gut_metagenome_contig13123000268.

[0261] SEQ ID NO: 33 is an exemplary Cas13d sequence from Gut_metagenome_contig5294000434.

[0262] SEQ ID NO: 34 is an exemplary Cas13d sequence from Gut_metagenome_contig6415000192.

[0263] SEQ ID NO: 35 is an exemplary Cas13d sequence from Gut_metagenome_contig6144000300.

[0264] SEQ ID NO: 36 is an exemplary Cas13d sequence from Gut_metagenome_contig9118000041.

[0265] SEQ ID NO: 37 is an exemplary Cas13d sequence from Activated_sludge_metagenome_transcript_124486.

[0266] SEQ ID NO: 38 is an exemplary Cas13d sequence from Gut_metagenome_contig1322000437.

[0267] SEQ ID NO: 39 is an exemplary Cas13d sequence from Gut_metagenome_contig4582000531.

[0268] SEQ ID NO: 40 is an exemplary Cas13d sequence from Gut_metagenome_contig9190000283.

[0269] SEQ ID NO: 41 is an exemplary Cas13d sequence from Gut_metagenome_contigl709000510.

[0270] SEQ ID NO: 42 is an exemplary Cas13d sequence from M24_(LSQX01212483_Anaerobic_digester_metagenome) with a HEPN domain.

[0271] SEQ ID NO: 43 is an exemplary Cas13d sequence from Gut_metagenome_contig3833000494.

[0272] SEQ ID NO: 44 is an exemplary Cas13d sequence from Activated_sludge_metagenome_transcript_117355.

[0273] SEQ ID NO: 45 is an exemplary Cas13d sequence from Gut_metagenome_contigl1061000330.

[0274] SEQ ID NO: 46 is an exemplary Cas13d sequence from Gut_metagenome_contig338000322 from sheep gut metagenome.

[0275] SEQ ID NO: 47 is an exemplary Cas13d sequence from human gut metagenome.

[0276] SEQ ID NO: 48 is an exemplary Cas13d sequence from Gut_metagenome_contig9530000097.

[0277] SEQ ID NO: 49 is an exemplary Cas13d sequence from Gut_metagenome_contigl750000258.

[0278] SEQ ID NO: 50 is an exemplary Cas13d sequence from Gut_metagenome_contig5377000274.

[0279] SEQ ID NO: 51 is an exemplary Cas13d sequence from gut_metagenome_P19E0k2120140920_c248000089.

[0280] SEQ ID NO: 52 is an exemplary Cas13d sequence from Gut_metagenome_contigll400000031.

[0281] SEQ ID NO: 53 is an exemplary Cas13d sequence from Gut_metagenome_contig7940000191.

[0282] SEQ ID NO: 54 is an exemplary Cas13d sequence from Gut_metagenome_contig6049000251.

[0283] SEQ ID NO: 55 is an exemplary Cas13d sequence from Gut_metagenome_contigl137000500.

[0284] SEQ ID NO: 56 is an exemplary Cas13d sequence from Gut_metagenome_contig9368000105.

[0285] SEQ ID NO: 57 is an exemplary Cas13d sequence from Gut_metagenome_contig546000275.

[0286] SEQ ID NO: 58 is an exemplary Cas13d sequence from Gut_metagenome_contig7216000573.

[0287] SEQ ID NO: 59 is an exemplary Cas13d sequence from Gut_metagenome_contig4806000409.

[0288] SEQ ID NO: 60 is an exemplary Cas13d sequence from Gut_metagenome_contig10762000480.

[0289] SEQ ID NO: 61 is an exemplary Cas13d sequence from Gut_metagenome_contig4114000374.

[0290] SEQ ID NO: 62 is an exemplary Cas13d sequence from Ruminococcus_flavefaciens_FD1.

[0291] SEQ ID NO: 63 is an exemplary Cas13d sequence from Gut_metagenome_contig7093000170.

[0292] SEQ ID NO: 64 is an exemplary Cas13d sequence from Gut_metagenome_contigl1113000384.

[0293] SEQ ID NO: 65 is an exemplary Cas13d sequence from Gut_metagenome_contig6403000259.

[0294] SEQ ID NO: 66 is an exemplary Cas13d sequence from Gut_metagenome_contig6193000124.

[0295] SEQ ID NO: 67 is an exemplary Cas13d sequence from Gut_metagenome_contig721000619.

[0296] SEQ ID NO: 68 is an exemplary Cas13d sequence from Gut_metagenome_contigl666000270.

[0297] SEQ ID NO: 69 is an exemplary Cas13d sequence from Gut_metagenome_contig2002000411.

[0298] SEQ ID NO: 70 is an exemplary Cas13d sequence from Ruminococcus_albus.

[0299] SEQ ID NO: 71 is an exemplary Cas13d sequence from Gut_metagenome_contig13552000311.

[0300] SEQ ID NO: 72 is an exemplary Cas13d sequence from Gut_metagenome_contig10037000527.

[0301] SEQ ID NO: 73 is an exemplary Cas13d sequence from Gut_metagenome_contig238000329.

[0302] SEQ ID NO: 74 is an exemplary Cas13d sequence from Gut_metagenome_contig2643000492.

[0303] SEQ ID NO: 75 is an exemplary Cas13d sequence from Gut_metagenome_contig874000057.

[0304] SEQ ID NO: 76 is an exemplary Cas13d sequence from Gut_metagenome_contig4781000489.

[0305] SEQ ID NO: 77 is an exemplary Cas13d sequence from Gut_metagenome_contigl2144000352.

[0306] SEQ ID NO: 78 is an exemplary Cas13d sequence from Gut_metagenome_contig5590000448.

[0307] SEQ ID NO: 79 is an exemplary Cas13d sequence from Gut_metagenome_contig9269000031.

[0308] SEQ ID NO: 80 is an exemplary Cas13d sequence from Gut_metagenome_contig8537000520.

[0309] SEQ ID NO: 81 is an exemplary Cas13d sequence from Gut_metagenome_contigl845000130.

[0310] SEQ ID NO: 82 is an exemplary Cas13d sequence from gut_metagenome_P13E0k2120140920_c3000072.

[0311] SEQ ID NO: 83 is an exemplary Cas13d sequence from gut_metagenome_P1 E0k2120140920_cI000078.

[0312] SEQ ID NO: 84 is an exemplary Cas13d sequence from Gut_metagenome_contigl2990000099.

[0313] SEQ ID NO: 85 is an exemplary Cas13d sequence from Gut_metagenome_contig525000349.

[0314] SEQ ID NO: 86 is an exemplary Cas13d sequence from Gut_metagenome_contig7229000302.

[0315] SEQ ID NO: 87 is an exemplary Cas13d sequence from Gut_metagenome_contig3227000343.

[0316] SEQ ID NO: 88 is an exemplary Cas13d sequence from Gut_metagenome_contig7030000469.

[0317] SEQ ID NO: 89 is an exemplary Cas13d sequence from Gut_metagenome_contig5149000068.

[0318] SEQ ID NO: 90 is an exemplary Cas13d sequence from Gut_metagenome_contig400200045.

[0319] SEQ ID NO: 91 is an exemplary Cas13d sequence from Gut_metagenome_contig10420000446.

[0320] SEQ ID NO: 92 is an exemplary Cas13d sequence from new_flavefaciens_strain_XPD3002 (CasRx).

[0321] SEQ ID NO: 93 is an exemplary Cas13d sequence from M26_Gut_metagenome_contig698000307.

[0322] SEQ ID NO: 94 is an exemplary Cas13d sequence from M36_Uncultured_Eubacterium_sp_TS28_c40956.

[0323] SEQ ID NO: 95 is an exemplary Cas13d sequence from M12_gut_metagenome_P25C0k2120140920_c134000066.

[0324] SEQ ID NO: 96 is an exemplary Cas13d sequence from human gut metagenome.

[0325] SEQ ID NO: 97 is an exemplary Cas13d sequence from MlO_gut_metagenome P25C90k2120 1 40920_c2800004 1.

[0326] SEQ ID NO: 98 is an exemplary Cas13d sequence from 30 Ml I_gut_metagenome_P25C7k2120140920_c4078000105.

[0327] SEQ ID NO: 99 is an exemplary Cas13d sequence from gut_metagenome_P25C0k2120140920_c32000045.

[0328] SEQ ID NO: 100 is an exemplary Cas13d sequence from M13_gut_metagenome P23C7k2120140920_c3000067.

[0329] SEQ ID NO: 101 is an exemplary Cas13d sequence from M5_gut_metagenome_Pl8E90k2120140920.

[0330] SEQ ID NO: 102 is an exemplary Cas13d sequence from M21_gut_metagenome_Pl8EMk2120140920.

[0331] SEQ ID NO: 103 is an exemplary Cas13d sequence from M7_gut_metagenome P38C7k2120 1 40920_c484 1 000003.

[0332] SEQ ID NO: 104 is an exemplary Cas13d sequence from Ruminococcus_bicirculans.

[0333] SEQ ID NO: 105 is an exemplary Cas13d sequence.

[0334] SEQ ID NO: 106 is an exemplary Cas13d consensus sequence.

[0335] SEQ ID NO: 107 is an exemplary Cas13d sequence from M18_gut_metagenome_P22EOk2120140920_c3395000078.

[0336] SEQ ID NO: 108 is an exemplary Cas13d sequence from M17_gut_metagenome_P22E90k2120140920_c 114.

[0337] SEQ ID NO: 109 is an exemplary Cas13d sequence from Ruminococcus_sp_CAG57.

[0338] SEQ ID NO: 110 is an exemplary Cas13d sequence from gut_metagenome_Pl 1E90k2120140920_c43000123.

[0339] SEQ ID NO: 111 is an exemplary Cas13d sequence from M6_gut_metagenome_P13E90k2120 1 40920_c7000009.

[0340] SEQ ID NO: 112 is an exemplary Cas13d sequence from M19_gut_metagenome_Pl 7E90k2120140920.

[0341] SEQ ID NO: 113 is an exemplary Cas13d sequence from gut_metagenome_P17E0k2120140920,_c87000043.

[0342] SEQ ID NO: 114 is an exemplary human codon optimized Eubacterium siraeum Cas13d nucleic acid sequence.

[0343] SEQ ID NO: 115 is an exemplary human codon optimized Eubacterium siraeum Cas13d nucleic acid sequence with a mutant HEPN domain.

[0344] SEQ ID NO: 116 is an exemplary human codon-optimized Eubacterium siraeum Cas13d nucleic acid sequence with N-terminal NLS.

[0345] SEQ ID NO: 117 is an exemplary human codon-optimized Eubacterium siraeum Cas13d nucleic acid sequence with N- and C-terminal NLS tags.

[0346] SEQ ID NO: 118 is an exemplary human codon-optimized uncultured Ruminococcus sp. Cas13d 30 nucleic acid sequence.

[0347] SEQ ID NO: 119 is an exemplary human codon-optimized uncultured Ruminococcus sp. Cas13d nucleic acid sequence with a mutant HEPN domain.

[0348] SEQ ID NO: 120 is an exemplary human codon-optimized uncultured Ruminococcus sp. Cas13d nucleic acid sequence with N-terminal NLS.

[0349] SEQ ID NO: 121 is an exemplary human codon-optimized uncultured Ruminococcus sp. Cas13d nucleic acid sequence with N- and C-terminal NLS tags.

[0350] SEQ ID NO: 122 is an exemplary human codon-optimized uncultured Ruminococcus flavefaciens FDl Cas13d nucleic acid sequence.

[0351] SEQ ID NO: 123 is an exemplary human codon-optimized uncultured Ruminococcus favefaciens FDl Cas13d nucleic acid sequence with mutated HEPN domain.

[0352] SEQ ID NO: 124 is an exemplary Cas13d nucleic acid sequence from Ruminococcus bicirculans.

[0353] SEQ ID NO: 125 is an exemplary Cas13d nucleic acid sequence from Eubacterium siraeum.

[0354] SEQ ID NO: 126 is an exemplary Cas13d nucleic acid sequence from Ruminococcus flavefaciens FD1.

[0355] SEQ ID NO: 127 is an exemplary Cas13d nucleic acid sequence from Ruminococcus albus.

[0356] SEQ ID NO: 128 is an exemplary Cas13d nucleic acid sequence from Ruminococcus flavefaciens XPD.

[0357] SEQ ID NO: 129 is an exemplary consensus DR nucleic acid sequence for E. siraeum Cas13d.

[0358] SEQ ID NO: 130 is an exemplary consensus DR nucleic acid sequence for Rum. Sp. Cas13d.

[0359] SEQ ID NO: 131 is an exemplary consensus DR nucleic acid sequence for Rum. Flavefaciens strain XPD3002 Cas13d (CasRx).

[0360] SEQ ID NOS: 132-137 are exemplary consensus DR nucleic acid sequences.

[0361] SEQ ID NO: 138 is an exemplary 50% consensus sequence for seven full-length Cas13d orthologues.

[0362] SEQ ID NO: 139 is an exemplary Cas13d nucleic acid sequence from Gut metagenome PlEO.

[0363] SEQ ID NO: 140 is an exemplary Cas13d nucleic acid sequence from Anaerobic digester.

[0364] SEQ ID NO: 141 is an exemplary Cas13d nucleic acid sequence from Ruminococcus sp. CAG:57.

[0365] SEQ ID NO: 142 is an exemplary human codon-optimized uncultured Gut metagenome PlEO Cas13d nucleic acid sequence.

[0366] SEQ ID NO: 143 is an exemplary human codon-optimized Anaerobic Digester Cas13d nucleic acid sequence.

[0367] SEQ ID NO: 144 is an exemplary human codon-optimized Ruminococcus flavefaciens XPD Cas13d nucleic acid sequence.

[0368] SEQ ID NO: 145 is an exemplary human codon-optimized Ruminococcus albus Cas13d nucleic acid sequence.

[0369] SEQ ID NO: 146 is an exemplary processing of the Ruminococcus sp. CAG:57 CRISPR array.

[0370] SEQ ID NO: 147 is an exemplary Cas13d protein sequence from contig emb |OBVH01003037.1, human gut metagenome sequence (also found in WGS contigs emb |OBXZ01000094.1| and emb |OBJFO1000033.1.

[0371] SEQ ID NO: 148 is an exemplary consensus DR nucleic acid sequence (goes with SEQ ID NO: 147).

[0372] SEQ ID NO: 149 is an exemplary Cas13d protein sequence from contig tpg |DBYI01000091.1| (Uncultivated Ruminococcus flavefaciens UBA1190 assembled from bovine gut metagenome).

[0373] SEQ ID NOS: 150-152 are exemplary consensus DR nucleic acid sequences (goes with SEQ ID NO: 149).

[0374] SEQ ID NO: 153 is an exemplary Cas13d protein sequence from contig tpg |DJXD01000002.1| (uncultivated Ruminococcus assembly, UBA7013, from sheep gutmetagenome).

[0375] SEQ ID NO: 154 is an exemplary consensus DR nucleic acid sequence (goes with SEQ ID NO: 153).

[0376] SEQ ID NO: 155 is an exemplary Cas13d protein sequence from contig OGZC01000639.1 (human gut metagenome assembly).

[0377] SEQ ID NOS: 156-177 are exemplary consensus DR nucleic acid sequences (goes with SEQ ID NO: 155).

[0378] SEQ ID NO: 158 is an exemplary Cas13d protein sequence from contig emb |OHBM01000764.1 (human gut metagenome assembly).

[0379] SEQ ID NO: 159 is an exemplary consensus DR nucleic acid sequence (goes with SEQ ID NO: 158).

[0380] SEQ ID NO: 160 is an exemplary Cas13d protein sequence from contig emb |0HCP01000044.1 (human gut metagenome assembly).

[0381] SEQ ID NO: 161 is an exemplary consensus DR nucleic acid sequence (goes with SEQ ID NO: 160).

[0382] SEQ ID NO: 162 is an exemplary Cas13d protein sequence from contig embl0GDF01008514.1 (human gut metagenome assembly).

[0383] SEQ ID NO: 163 is an exemplary consensus DR nucleic acid sequence (goes with SEQ ID NO: 162).

[0384] SEQ ID NO: 164 is an exemplary Cas13d protein sequence from contig emb |0GPN01002610.1 (human gut metagenome assembly).

[0385] SEQ ID NO: 165 is an exemplary consensus DR nucleic acid sequence (goes with SEQ ID NO: 164).

[0386] SEQ ID NO: 166 is an exemplary Cas13d protein sequence from contig NFIR01000008. 1 (Eubacterium sp. An3, from chicken gut metagenome).

[0387] SEQ ID NO: 167 is an exemplary consensus DR nucleic acid sequence (goes with SEQ ID NO: 166).

[0388] SEQ ID NO: 168 is an exemplary Cas13d protein sequence from contig NFLV01000009.1 (Eubacterium sp. An11 from chicken gut metagenome).

[0389] SEQ ID NO: 169 is an exemplary consensus DR nucleic acid sequence (goes with SEQ ID NO: 168).

[0390] SEQ ID NOS: 171-174 are an exemplary Cas13d motif sequences.

[0391] SEQ ID NO: 175 is an exemplary Cas13d protein sequence from contig OJMM01002900 human gut metagenome sequence.

[0392] SEQ ID NO: 176 is an exemplary consensus DR nucleic acid sequence (goes with SEQ ID NO: 175).

[0393] SEQ ID NO: 177 is an exemplary Cas13d protein sequence from contig ODAI011611274.1 gut metagenome sequence.

[0394] SEQ ID NO: 178 is an exemplary consensus DR nucleic acid sequence (goes with SEQ ID NO: 177).

[0395] SEQ ID NO: 179 is an exemplary Cas13d protein sequence from contig OIZX01000427.1.

[0396] SEQ ID NO: 180 is an exemplary consensus DR nucleic acid sequence (goes with SEQ ID NO: 179).

[0397] SEQ ID NO: 181 is an exemplary Cas13d protein sequence from contig emb |OCVV012889144.1|.

[0398] SEQ ID NO: 182 is an exemplary consensus DR nucleic acid sequence (goes with SEQ ID NO: 181).

[0399] SEQ ID NO: 183 is an exemplary Cas13d protein sequence from contig OCTW011587266.1

[0400] SEQ ID NO: 184 is an exemplary consensus DR nucleic acid sequence (goes with SEQ ID NO: 183).

[0401] SEQ ID NO: 185 is an exemplary Cas13d protein sequence from contig emb |OGNFO 1009141.1.

[0402] SEQ ID NO: 186 is an exemplary consensus DR nucleic acid sequence (goes with SEQ ID NO: 185).

[0403] SEQ ID NO: 187 is an exemplary Cas13d protein sequence from contig emb |OIEN01002196.1.

[0404] SEQ ID NO: 188 is an exemplary consensus DR nucleic acid sequence (goes with SEQ ID NO: 187).

[0405] SEQ ID NO: 189 is an exemplary Cas13d protein sequence from contig e-k87_11092736.

[0406] SEQ ID NOS: 190-193 are exemplary consensus DR nucleic acid sequences (goes with SEQ ID NO: 189).

[0407] SEQ ID NO: 194 is an exemplary Cas13d sequence from Gut_metagenome_contig6893000291.

[0408] SEQ ID NOS: 195-197 are exemplary Cas13d motif sequences.

[0409] SEQ ID NO: 198 is an exemplary Cas13d protein sequence from Ga0224415_10007274.

[0410] SEQ ID NO: 199 is an exemplary consensus DR nucleic acid sequence (goes with SEQ ID NO: 198).

[0411] SEQ ID NO: 200 is an exemplary Cas13d protein sequence from EMG_10003641.

[0412] SEQ ID NO: 202 is an exemplary Cas13d protein sequence from Ga0129306_1000735.

[0413] SEQ ID NO: 201 is an exemplary consensus DR nucleic acid sequence (goes with SEQ ID NO: 200).

[0414] SEQ ID NO: 202 is an exemplary Cas13d protein sequence from Ga0129306_1000735.

[0415] SEQ ID NO: 203 is an exemplary consensus DR nucleic acid sequence (goes with SEQ ID NO: 203

[0416] SEQ ID NO: 204 is an exemplary Cas13d protein sequence from GaO129317_1 008067.

[0417] SEQ ID NO: 205 is an exemplary consensus DR nucleic acid sequence (goes with SEQ ID NO: 204).

[0418] SEQ ID NO: 206 is an exemplary Cas13d protein sequence from Ga0224415_10048792.

[0419] SEQ ID NO: 207 is an exemplary consensus DR nucleic acid sequence (goes with SEQ ID NO: 206).

[0420] SEQ ID NO: 208 is an exemplary Cas13d protein sequence from 160582958_gene49834.

[0421] SEQ ID NO: 209 is an exemplary consensus DR nucleic acid sequence (goes with SEQ ID NO: 208).

[0422] SEQ ID NO: 210 is an exemplary Cas13d protein sequence from 250twins_35838_GLOI10300.

[0423] SEQ ID NO: 211 is an exemplary consensus DR nucleic acid sequence (goes with SEQ ID NO: 210).

[0424] SEQ ID NO: 212 is an exemplary Cas13d protein sequence from 250twins_36050_GLOI58985.

[0425] SEQ ID NO: 213 is an exemplary consensus DR nucleic acid sequence (goes with SEQ ID NO: 212).

[0426] SEQ ID NO: 214 is an exemplary Cas13d protein sequence from 31009_GL0034153.

[0427] SEQ ID NO: 215 is an exemplary consensus DR nucleic acid sequence (goes with SEQ ID NO: 214).

[0428] SEQ ID NO: 216 is an exemplary Cas13d protein sequence from 530373_GL0023589.

[0429] SEQ ID NO: 217 is an exemplary consensus DR nucleic acid sequence (goes with SEQ ID NO: 216).

[0430] SEQ ID NO: 218 is an exemplary Cas13d protein sequence from BMZ-l 1B_GL0037771.

[0431] SEQ ID NO: 219 is an exemplary consensus DR nucleic acid sequence (goes with SEQ ID NO: 218).

[0432] SEQ ID NO: 220 is an exemplary Cas13d protein sequence from BMZ-l 1B_GL0037915.

[0433] SEQ ID NO: 221 is an exemplary consensus DR nucleic acid sequence (goes with SEQ ID NO: 220).

[0434] SEQ ID NO: 222 is an exemplary Cas13d protein sequence from BMZ-l 1B_GL00696 1 7.

[0435] SEQ ID NO: 223 is an exemplary consensus DR nucleic acid sequence (goes with SEQ ID NO: 222).

[0436] SEQ ID NO: 224 is an exemplary Cas13d protein sequence from DLF014_GL0011914.

[0437] SEQ ID NO: 225 is an exemplary consensus DR nucleic acid sequence (goes with SEQ ID NO: 224).

[0438] SEQ ID NO: 226 is an exemplary Cas13d protein sequence from EYZ-362B_GL0088915.

[0439] SEQ ID NO: 227-228 are exemplary consensus DR nucleic acid sequences (goes with SEQ ID NO: 226).

[0440] SEQ ID NO: 229 is an exemplary Cas13d protein sequence from Ga0099364 10024192.

[0441] SEQ ID NO: 230 is an exemplary consensus DR nucleic acid sequence (goes with SEQ ID NO: 229).

[0442] SEQ ID NO: 231 is an exemplary Cas13d protein sequence from Ga0187910_10006931.

[0443] SEQ ID NO: 232 is an exemplary consensus DR nucleic acid sequence (goes with SEQ ID NO: 231).

[0444] SEQ ID NO: 233 is an exemplary Cas13d protein sequence from Ga0187910_10015336.

[0445] SEQ ID NO: 234 is an exemplary consensus DR nucleic acid sequence (goes with SEQ ID NO: 233).

[0446] SEQ ID NO: 235 is an exemplary Cas13d protein sequence from Ga0187910_10040531.

[0447] SEQ ID NO: 236 is an exemplary consensus DR nucleic acid sequence (goes with SEQ ID NO: 23).

[0448] SEQ ID NO: 237 is an exemplary Cas13d protein sequence from Ga0187911_10069260.

[0449] SEQ ID NO: 238 is an exemplary consensus DR nucleic acid sequence (goes with SEQ ID NO: 237).

[0450] SEQ ID NO: 239 is an exemplary Cas13d protein sequence from MH0288_GL0082219.

[0451] SEQ ID NO: 240 is an exemplary consensus DR nucleic acid sequence (goes with SEQ ID NO: 239).

[0452] SEQ ID NO: 241 is an exemplary Cas13d protein sequence from O2.UC29-0_GL0096317.

[0453] SEQ ID NO: 242 is an exemplary consensus DR nucleic acid sequence (goes with SEQ ID NO: 241).

[0454] SEQ ID NO: 243 is an exemplary Cas13d protein sequence from PIG-014_GL0226364.

[0455] SEQ ID NO: 244 is an exemplary consensus DR nucleic acid sequence (goes with SEQ ID NO: 243).

[0456] SEQ ID NO: 245 is an exemplary Cas13d protein sequence from PIG-018_GL0023397.

[0457] SEQ ID NO: 246 is an exemplary consensus DR nucleic acid sequence (goes with SEQ ID NO: 245).

[0458] SEQ ID NO: 247 is an exemplary Cas13d protein sequence from PIG-025_GL0099734.

[0459] SEQ ID NO: 248 is an exemplary consensus DR nucleic acid sequence (goes with SEQ ID NO: 247).

[0460] SEQ ID NO: 249 is an exemplary Cas13d protein sequence from PIG-028_GL0185479.

[0461] SEQ ID NO: 250 is an exemplary consensus DR nucleic acid sequence (goes with SEQ ID NO: 249).

[0462] SEQ ID NO: 251 is an exemplary Cas13d protein sequence from −Ga0224422_10645759.

[0463] SEQ ID NO: 252 is an exemplary consensus DR nucleic acid sequence (goes with SEQ ID NO: 251).

[0464] SEQ ID NO: 253 is an exemplary Cas13d protein sequence from ODAI chimera.

[0465] SEQ ID NO: 254 is an exemplary consensus DR nucleic acid sequence (goes with SEQ ID NO: 253).

[0466] SEQ ID NO: 255 is an HEPN motif.

[0467] SEQ ID NOs: 256 and 257 are exemplary Cas13d nuclear localization signal amino acid and nucleic acid sequences, respectively.

[0468] SEQ ID NOs: 258 and 260 are exemplary SV40 large T antigen nuclear localization signal amino acid and nucleic acid sequences, respectively.

[0469] SEQ ID NO: 259 is a dCas9 target sequence.

[0470] SEQ ID NO: 261 is an artificial Eubacterium siraeum nCasl array targeting ccdB.

[0471] SEQ ID NO: 262 is a full 36 nt direct repeat.

[0472] SEQ ID NOs: 263-266 are spacer sequences.

[0473] SEQ ID NO: 267 is an artificial uncultured Ruminoccus sp. nCasl array targeting ccdB.

[0474] SEQ ID NO: 268 is a full 36 nt direct repeat.

[0475] SEQ ID NOs: 269-272 are spacer sequences.

[0476] SEQ ID NO: 273 is a ccdB target RNA sequence.

[0477] SEQ ID NOs: 274-277 are spacer sequences.

[0478] SEQ ID NO: 278 is a mutated Cas13d sequence, NLS-Ga_0531(trunc)-NLS-HA. This mutant has a deletion of the non-conserved N-terminus.

[0479] SEQ ID NO: 279 is a mutated Cas13d sequence, NES-Ga_0531(trunc)-NES-HA. This mutant has a deletion of the non-conserved N-terminus.

[0480] SEQ ID NO: 280 is a full-length Cas13d sequence, NLS-RfxCas13d-NLS-HA.

[0481] SEQ ID NO: 281 is a mutated Cas13d sequence, NLS-RfxCas13d(del5)-NLS-HA. This mutant has a deletion of amino acids 558-587.

[0482] SEQ ID NO: 282 is a mutated Cas13d sequence, NLS-RfxCas13d(del5.12)-NLS-HA. This mutant has a deletion of amino acids 558-587 and 953-966.

[0483] SEQ ID NO: 283 is a mutated Cas13d sequence, NLS-RfxCas13d(del5.13)-NLS-HA. This mutant has a deletion of amino acids 376-392 and 558-587.

[0484] SEQ ID NO: 284 is a mutated Cas13d sequence, NLS-RfxCas13d(del5.12+5. 13)-NLS-HA. This mutant has a deletion of amino acids 376-392, 558-587, and 953-966.

[0485] SEQ ID NO: 285 is a mutated Cas13d sequence, NLS-RfxCas13d(dell3)-NLS-HA. This mutant has a deletion of amino acids 376-392.

[0486] SEQ ID NO: 286 is an effector sequence used to edit expression of ADAR2. Amino acids 1 to 969 are dRfxCas13, aa 970 to 991 are an NLS sequence, and amino acids 992 to 1378 are ADAR2DD.

[0487] SEQ ID NO: 287 is an exemplary HIV NES protein sequence.

[0488] SEQ ID NOS: 288-291 are exemplary Cas13d motif sequences.

[0489] SEQ ID NO: 292 is Cas13d ortholog sequence MH_4866.

[0490] SEQ ID NO: 293 is an exemplary Cas13d protein sequence from 037_-_emblOIZA01000315.11

[0491] SEQ ID NO: 294 is an exemplary Cas13d protein sequence from PIG-022 GL002635 1.

[0492] SEQ ID NO: 295 is an exemplary Cas13d protein sequence from PIG-046_GL0077813.

[0493] SEQ ID NO: 296 is an exemplary Cas13d protein sequence from pig chimera.

[0494] SEQ ID NO: 297 is an exemplary nuclease-inactive or dead Cas13d (dCas13d) protein sequence from Ruminococcus flavefaciens XPD3002 (CasRx)

[0495] SEQ ID NO: 298 is an exemplary Cas13d protein sequence.

[0496] SEQ ID NO: 299 is an exemplary Cas13d protein sequence from (contig tpg|DJXD01000002.1|; uncultivated Ruminococcus assembly, UBA7013, from sheep gut metagenome).

[0497] SEQ ID NO: 300 is an exemplary Cas13d direct repeat nucleotide sequence from Cas13d (contig tpg|DJXD01000002.1|; uncultivated Ruminococcus assembly, UBA7013, from sheep gut metagenome (goes with SEQ ID NO: 299).

[0498] SEQ ID NO: 301 is an exemplary Cas13d protein contig emb|OBLI01020244.

[0499] Yan et al. (2018) Mol Cell. 70(2):327-339 (doi: 10.1016/j.molcel.2018.02.2018) and Konermann et al. (2018) Cell 173(3):665-676 (doi: 10.1016/j.cell/2018.02.033) have described Cas13d proteins and both of which are incorporated by reference herein in their entireties. Also see WO Publication Nos. WO2018/183403 (CasM, which is Cas13d) and WO2019/006471 (Cas13d), which are incorporated herein by reference in their entirety.

[0500] SEQ ID NO: 587 is an exemplary casl3d with no catalytic activity, referred to as deactivatedCas13d or dCas13d.

[0501] SEQ ID NO: 590 is an exemplary cas13d with no catalytic activity, referred to as deactivatedCas13d or dCas13d.

[0502] SEQ ID NO: 591 is an exemplary cas13d with no catalytic activity, referred to as deactivatedCas13d or dCas13d.

[0503] SEQ ID NO: 592 is an exemplary cas13d with no catalytic activity, referred to as deactivatedCas13d or dCas13d.

[0504] SEQ ID NO: 593 is an exemplary cas13d with no catalytic activity, referred to as deactivatedCas13d or dCas13d.

[0505] SEQ ID NO: 594 is an exemplary cas13d with no catalytic activity, referred to as deactivatedCas13d or dCas13d.

[0506] SEQ ID NO: 303 is an exemplary CasM protein from Eubacterium siraeum.

[0507] SEQ ID NO: 304 is an exemplary CasM protein from Ruminococcus sp., isolate 2789STDY5834971.

[0508] SEQ ID NO: 305 is an exemplary CasM protein from Ruminococcus bicirculans.

[0509] SEQ ID NO: 306 is an exemplary CasM protein from Ruminococcus sp., isolate 2789STDY5608892.

[0510] SEQ ID NO: 307 is an exemplary CasM protein from Ruminococcus sp. CAG:57.

[0511] SEQ ID NO: 308 is an exemplary CasM protein from Ruminococcus flavefaciens FD-1.

[0512] SEQ ID NO: 309 is an exemplary CasM protein from Ruminococcus albus strain KH2T6.

[0513] SEQ ID NO: 310 is an exemplary CasM protein from Ruminococcus flavefaciens strain XPD3002.

[0514] SEQ ID NO: 311 is an exemplary CasM protein from Ruminococcus sp., isolate 2789STDY5834894.

[0515] SEQ ID NO: 312 is an exemplary RtcB homolog.

[0516] SEQ ID NO: 313 is an exemplary WYL from Eubacterium siraeum+C-terminal NLS.

[0517] SEQ ID NO: 314 is an exemplary WYL from Ruminococcus sp. isolate 2789STDY5834971+C-term NLS.

[0518] SEQ ID NO: 315 is an exemplary WYL from Ruminococcus bicirculans+C-term NLS.

[0519] SEQ ID NO: 316 is an exemplary WYL from Ruminococcus sp. isolate 2789STDY5608892+C-term NLS.

[0520] SEQ ID NO: 317 is an exemplary WYL from Ruminococcus sp. CAG:57+C-term NLS.

[0521] SEQ ID NO: 318 is an exemplary WYL from Ruminococcus flavefaciens FD-1+C-term NLS.

[0522] SEQ ID NO: 319 is an exemplary WYL from Ruminococcus albus strain KH2T6+C-term NLS.

[0523] SEQ ID NO: 320 is an exemplary WYL from Ruminococcus flavefaciens strain XPD3002+C-term NLS.

[0524] SEQ ID NO: 321 is an exemplary RtcB from Eubacterium siraeum+C-term NLS.

[0525] SEQ ID NO: 322 is an exemplary direct repeat sequence of Ruminococcus flavefaciens XPD3002 Cas13d (CasRx).

[0526] Exemplary wild type Cas13d proteins of the disclosure may comprise or consist of the amino acid sequence SEQ ID NO: 92 or SEQ ID NO: 298 (Cas13d protein also known as CasRx).

[0527] An exemplary direct repeat sequence of Ruminococcus flavefaciens XPD3002 Cas13d (CasRx) comprises the nucleic acid sequence:

(SEQ ID NO: 302)
AACCCCTACCAACTGGTCGGGGTTTGAAAC.

gRNA Target Sequences

[0528] The compositions of the disclosure bind and destroy a target sequence of an RNA molecule comprising a pathogenic repeat sequence. In one embodiment, the target RNA comprises a sequence motif corresponding to a spacer sequence of the guide RNA corresponding to the RNA-guided RNA-binding protein. In some embodiments, one or more spacer sequences are used to target one or more target sequences. In some embodiments, multiple spacers are used to target multiple target RNAs. Such target RNAs can be different target sites within the same RNA molecule or can be different target sites within different RNA molecules. Spacer sequences can also target non-coding RNA. In some embodiments, multiple promoters, e.g., Pol III promoters) can be used to drive multiple spacers in a gRNA for targeting multiple target RNAs. In one embodiment, the destruction of the target RNA(s) or target sequence motif(s) reduces expression of pathogenic CAG repeat RNA thereby treating CAG repeat disease such as HD or SCA1 and/or ameliorating one or more symptoms associated with CAG repeat diseases such as HD or SCA1.

[0529] In some embodiments of the compositions and methods of the disclosure, the sequence motif of the target RNA is a signature of a disease or disorder.

[0530] A sequence motif of the disclosure may be isolated or derived from a sequence of foreign or exogenous sequence found in a genomic sequence, and therefore translated into an mRNA molecule of the disclosure or a sequence of foreign or exogenous sequence found in an RNA sequence of the disclosure.

[0531] A target sequence motif of the disclosure may comprise, consist of, be situated by, or be associated with a mutation in an endogenous sequence that causes a disease or disorder. The mutation may comprise or consist of a sequence substitution, inversion, deletion, insertion, transposition, or any combination thereof.

[0532] A target sequence motif of the disclosure may comprise or consist of a repeated sequence. In some embodiments, the repeated sequence may be associated with a microsatellite instability (MSI). MSI at one or more loci results from impaired DNA mismatch repair mechanisms of a cell of the disclosure. A hypervariable sequence of DNA may be transcribed into an mRNA of the disclosure comprising a target sequence comprising or consisting of the hypervariable sequence.

[0533] A target sequence motif of the disclosure may comprise or consist of a biomarker. The biomarker may indicate a risk of developing a disease or disorder. The biomarker may indicate a healthy gene (low or no determinable risk of developing a disease or disorder. The biomarker may indicate an edited gene. Exemplary biomarkers include, but are not limited to, single nucleotide polymorphisms (SNPs), sequence variations or mutations, epigenetic marks, splice acceptor sites, exogenous sequences, heterologous sequences, and any combination thereof.

[0534] A target sequence motif of the disclosure may comprise or consist of a secondary, tertiary or quaternary structure. The secondary, tertiary or quaternary structure may be endogenous or naturally occurring. The secondary, tertiary or quaternary structure may be induced or non-naturally occurring. The secondary, tertiary or quaternary structure may be encoded by an endogenous, exogenous, or heterologous sequence.

[0535] In some embodiments of the compositions and methods of the disclosure, a target sequence of an RNA molecule comprises or consists of between 2 and 100 nucleotides or nucleic acid bases, inclusive of the endpoints. In some embodiments, the target sequence of an RNA molecule comprises or consists of between 2 and 50 nucleotides or nucleic acid bases, inclusive of the endpoints. In some embodiments, the target sequence of an RNA molecule comprises or consists of between 2 and 20 nucleotides or nucleic acid bases, inclusive of the endpoints. In some embodiments, the target sequence of an RNA molecule comprises or consists of between 20-30 nucleotides or nucleic acid bases, inclusive of the endpoints. In some embodiments, the target sequence of an RNA molecule comprises or consists of about 26 nucleotides or nucleic acid bases, inclusive of the endpoints.

[0536] In some embodiments of the compositions and methods of the disclosure, a target sequence of an RNA molecule is continuous. In some embodiments, the target sequence of an RNA molecule is discontinuous. For example, the target sequence of an RNA molecule may comprise or consist of one or more nucleotides or nucleic acid bases that are not contiguous because one or more intermittent nucleotides are positioned in between the nucleotides of the target sequence.

[0537] In some embodiments of the compositions and methods of the disclosure, a target sequence of an RNA molecule is naturally occurring. In some embodiments, the target sequence of an RNA molecule is non-naturally occurring. Exemplary non-naturally occurring target sequences may comprise or consist of sequence variations or mutations, chimeric sequences, exogenous sequences, heterologous sequences, chimeric sequences, recombinant sequences, sequences comprising a modified or synthetic nucleotide or any combination thereof.

[0538] In some embodiments of the compositions and methods of the disclosure, a target sequence of an RNA molecule binds to a guide RNA of the disclosure. In some embodiments of the compositions and methods of the disclosure, one or more target sequences of an RNA molecule binds to one or more guide RNA spacer sequences of the disclosure.

[0539] In some embodiments of the compositions and methods of the disclosure, a target sequence of an RNA molecule binds to a first RNA binding protein of the disclosure.

[0540] In some embodiments of the compositions and methods of the disclosure, a target sequence of an RNA molecule binds to a second RNA binding protein of the disclosure.

[0541] Compositions of the disclosure comprise a gRNA comprising a spacer sequence that specifically binds to a target toxic CAG RNA repeat sequence. In some embodiments, the spacer which binds the target CAG RNA repeat sequence comprises or consists of about 20-30 nucleotides. In some embodiments, a gRNA comprises one or more spacer sequences.

[0542] Exemplary gRNA spacer sequences of the disclosure that specifically bind to a target CAG sequence of an RNA molecule are SEQ ID NOs 457-459.

### Endonucleases

[0543] In some embodiments, the compositions of the disclosure comprise a second RNA binding protein which comprises or consists of a nuclease or endonuclease domain. In some embodiments, the second RNA-binding protein is an effector protein. In some embodiments, the second RNA binding protein binds RNA in a manner in which it associates with RNA. In some embodiments, the second RNA binding protein associates with RNA in a manner in which it cleaves RNA. In some embodiments, the second RNA-binding protein is fused to a first RNA-binding protein which is a PUF, PUMBY, or PPR-based protein. In one embodiment, the second RNA-binding protein is fused to a first RNA-binding protein which is a catalytically deactivated Cas-based (dCas-based) protein.

[0544] In some embodiments of the compositions of the disclosure, the second RNA binding protein comprises or consists of an RNase.

[0545] In some embodiments, the second RNA binding protein comprises or consists of an RNase1. In some embodiments, the RNase1 protein comprises or consists of SEQ ID NO: 325.

[0546] In some embodiments, the second RNA binding protein comprises or consists of an RNase4. In some embodiments, the RNase4 protein comprises or consists of SEQ ID NO: 326.

[0547] In some embodiments, the second RNA binding protein comprises or consists of an RNase6. In some embodiments, the RNase6 protein comprises or consists of SEQ ID NO: 327.

[0548] In some embodiments, the second RNA binding protein comprises or consists of an RNase7. In some embodiments, the RNase7 protein comprises or consists of SEQ ID NO: 328.

[0549] In some embodiments, the second RNA binding protein comprises or consists of an RNase8. In some embodiments, the RNase8 protein comprises or consists of SEQ ID NO: 329.

[0550] In some embodiments, the second RNA binding protein comprises or consists of an RNase2. In some embodiments, the RNase2 protein comprises or consists of SEQ ID NO: 330.

[0551] In some embodiments, the second RNA binding protein comprises or consists of an RNase6PL. In some embodiments, the RNase6PL protein comprises or consists of SEQ ID NO: 331.

[0552] In some embodiments, the second RNA binding protein comprises or consists of an RNaseL. In some embodiments, the RNaseL protein comprises or consists of SEQ ID NO: 332.

[0553] In some embodiments, the second RNA binding protein comprises or consists of an RNaseT2. In some embodiments, the RNaseT2 protein comprises or consists of SEQ ID NO: 333.

[0554] In some embodiments, the second RNA binding protein comprises or consists of an RNase1 1. In some embodiments, the RNase1 1 protein comprises or consists of SEQ ID NO: 334.

[0555] In some embodiments, the second RNA binding protein comprises or consists of an RNaseT2-like. In some embodiments, the RNaseT2-like protein comprises or consists of SEQ ID NO: 335.

[0556] In some embodiments of the compositions of the disclosure, the second RNA binding protein comprises or consists of a mutated RNase.

[0557] In some embodiments, the second RNA binding protein comprises or consists of a mutated RNase1 (RNase1(K41R)) polypeptide. In some embodiments, the RNase1(K41R) polypeptide comprises or consists of SEQ ID NO: 336.

[0558] In some embodiments, the second RNA binding protein comprises or consists of a mutated RNase1 (RNase1(K41R, D121E)) polypeptide. In some embodiments, the RNase1 (RNase1(K41R, D121E)) polypeptide comprises or consists of SEQ ID NO: 337.

[0559] In some embodiments, the second RNA binding protein comprises or consists of a mutated RNase1 (RNase1(K41R, D121E, H119N)) polypeptide. In some embodiments, the RNase1 (RNase1(K41R, D121E, H119N)) polypeptide comprises or consists of SEQ ID NO: 338.

[0560] In some embodiments, the second RNA binding protein comprises or consists of a mutated RNase1. In some embodiments, the second RNA binding protein comprises or consists of a mutated RNase1 (RNase1(H119N)) polypeptide. In some embodiments, the RNase1 (RNase1(H119N)) polypeptide comprises or consists of SEQ ID NO: 339.

[0561] In some embodiments, the second RNA binding protein comprises or consists of a mutated RNase1 (RNase1(R39D, N67D, N88A, G89D, R91D, H119N)) polypeptide.

[0562] In some embodiments, the RNase1 (RNase1(R39D, N67D, N88A, G89D, R91D, H119N)) polypeptide comprises or consists of SEQ ID NO: 340.

[0563] In some embodiments, the second RNA binding protein comprises or consists of a mutated RNase1 (RNase1(R39D, N67D, N88A, G89D, R91D, H, 119N)) polypeptide. In some embodiments, the RNase1 (RNase1(R39D, N67D, N88A, G89D, R91D, H119N, K41R, D121E)) polypeptide comprises or consists of SEQ ID NO: 341.

[0564] In some embodiments, the second RNA binding protein comprises or consists of a mutated RNase1 (RNase1(R39D, N67D, N88A, G89D, R91D, H119N)) polypeptide. In some embodiments, the RNase1 (RNase1(R39D, N67D, N88A, G89D, R91D)) polypeptide comprises or consists of SEQ ID NO: 342.

[0565] In some embodiments, the second RNA binding protein comprises or consists of a mutated RNase1 (RNase1 (R39D, N67D, N88A, G89D, R91D, H119N, K41R, D121E)) polypeptide that comprises or consists of SEQ ID NO: 343.

[0566] In some embodiments of the compositions of the disclosure, the second RNA binding protein comprises or consists of a NOB1 polypeptide. In some embodiments, the NOB1 polypeptide comprises or consists of SEQ ID NO: 344.

[0567] In some embodiments of the compositions of the disclosure, the second RNA binding protein comprises or consists of an endonuclease. In some embodiments, the second RNA binding protein comprises or consists of an endonuclease V (ENDOV). In some embodiments, the ENDOV protein comprises or consists of SEQ ID NO: 345.

[0568] In some embodiments, the second RNA binding protein comprises or consists of an endonuclease G (ENDOG). In some embodiments, the ENDOG protein comprises or consists of SEQ ID NO: 346.

[0569] In some embodiments, the second RNA binding protein comprises or consists of an endonuclease D1 (ENDOD1). In some embodiments, the ENDOD1 protein comprises or consists of SEQ ID NO: 347.

[0570] In some embodiments, the second RNA binding protein comprises or consists of a Human flap endonuclease-1 (hFEN1). In some embodiments, the hFEN1 polypeptide comprises or consists of SEQ ID NO: 348.

[0571] In some embodiments, the second RNA binding protein comprises or consists of a DNA repair endonuclease XPF (ERCC4) polypeptide. In some embodiments, the ERCC4 polypeptide comprises or consists of SEQ ID NO: 349.

[0572] In some embodiments of the compositions of the disclosure, the second RNA binding protein comprises or consists of an Endonuclease III-like protein 1 (NTHL) polypeptide. In some embodiments, the NTHL polypeptide comprises or consists of SEQ ID NO: 340.

[0573] In some embodiments of the compositions of the disclosure, the second RNA binding protein comprises or consists of a human Schlafen 14 (hSLFN14) polypeptide. In some embodiments, the hSLFN14 polypeptide comprises or consists of SEQ ID NO: 351.

[0574] In some embodiments of the compositions of the disclosure, the second RNA binding protein comprises or consists of a human beta-lactamase-like protein 2 (hLACTB2) polypeptide. In some embodiments, the hLACTB2 polypeptide comprises or consists of SEQ ID NO: 352.

[0575] In some embodiments of the compositions of the disclosure, the second RNA binding protein comprises or consists of an apurinic/apyrimidinic (AP) endodeoxyribonuclease (APEX) polypeptide. In some embodiments, the second RNA binding protein comprises or consists of an apurinic/apyrimidinic (AP) endodeoxyribonuclease (APEX2) polypeptide. In some embodiments, the APEX2 polypeptide comprises or consists of SEQ ID NO: 353.

[0576] In some embodiments, the APEX2 polypeptide comprises or consists of SEQ ID NO: 354.

[0577] In some embodiments, the second RNA binding protein comprises or consists of an apurinic or apyrimidinic site lyase (APEX1) polypeptide. In some embodiments, the APEX1 polypeptide comprises or consists of SEQ ID NO: 355.

[0578] In some embodiments of the compositions of the disclosure, the second RNA binding protein comprises or consists of an angiogenin (ANG) polypeptide. In some embodiments, the ANG polypeptide comprises or consists of SEQ ID NO: 356.

[0579] In some embodiments of the compositions of the disclosure, the second RNA binding protein comprises or consists of a heat responsive protein 12 (HRSP12) polypeptide. In some embodiments, the HRSP12 polypeptide comprises or consists of SEQ ID NO: 357.

[0580] In some embodiments of the compositions of the disclosure, the second RNA binding protein comprises or consists of a Zinc Finger CCCH-Type Containing 12A (ZC3H12A) polypeptide. In some embodiments, the ZC3H12A polypeptide is an endonuclease domain of the ZC3H12A polypeptide which comprises or consists of SEQ ID NO: 358, also referred to as E17 herein. In some embodiments, the ZC3H12A polypeptide comprises or consists of SEQ ID NO: 359.

[0581] In some embodiments of the compositions of the disclosure, the second RNA binding protein comprises or consists of a Reactive Intermediate Imine Deaminase A (RIDA) polypeptide. In some embodiments, the RIDA polypeptide comprises or consists of SEQ ID NO: 360.

[0582] In some embodiments of the compositions of the disclosure, the second RNA binding protein comprises or consists of a Phospholipase D Family Member 6 (PDL6) polypeptide. In some embodiments, the PDL6 polypeptide comprises or consists of SEQ ID NO: 361.

[0583] In some embodiments of the compositions of the disclosure, the second RNA binding protein comprises or consists of a mitochondrial ribonuclease P catalytic subunit (KIAA0391) polypeptide. In some embodiments, the KIAA0391 polypeptide comprises or consists of SEQ ID NO: 362.

[0584] In some embodiments of the compositions of the disclosure, the second RNA binding protein comprises or consists of an argonaute 2 (AGO2) polypeptide. In some embodiments of the compositions of the disclosure, the AGO2 polypeptide comprises or consists of SEQ ID NO: 363.

[0585] In some embodiments of the compositions of the disclosure, the second RNA binding protein comprises or consists of a mitochondrial nuclease EXOG (EXOG) polypeptide. In some embodiments, the EXOG polypeptide comprises or consists of SEQ ID NO: 364.

[0586] In some embodiments of the compositions of the disclosure, the second RNA binding protein comprises or consists of a Zinc Finger CCCH-Type Containing 12D (ZC3H12D) polypeptide. In some embodiments, the ZC3H12D polypeptide comprises or consists of SEQ ID NO: 365.

[0587] In some embodiments of the compositions of the disclosure, the second RNA binding protein comprises or consists of an endoplasmic reticulum to nucleus signaling 2 (ERN2) polypeptide. In some embodiments, the ERN2 polypeptide comprises or consists of SEQ ID NO: 366.

[0588] In some embodiments of the compositions of the disclosure, the second RNA binding protein comprises or consists of a pelota mRNA surveillance and ribosome rescue factor (PELO) polypeptide. In some embodiments, the PELO polypeptide comprises or consists of SEQ ID NO: 367.

[0589] In some embodiments of the compositions of the disclosure, the second RNA binding protein comprises or consists of a YBEY metallopeptidase (YBEY) polypeptide. In some embodiments, the YBEY polypeptide comprises or consists of SEQ ID NO: 368.

[0590] In some embodiments of the compositions of the disclosure, the second RNA binding protein comprises or consists of a cleavage and polyadenylation specific factor 4 like (CPSF4L) polypeptide. In some embodiments, the CPSF4L polypeptide comprises or consists of SEQ ID NO: 369.

[0591] In some embodiments of the compositions of the disclosure, the second RNA binding protein comprises or consists of an hCG_2002731 polypeptide. In some embodiments, the hCG_2002731 polypeptide comprises or consists of SEQ ID NO: 370.

[0592] In some embodiments, the hCG_2002731 polypeptide comprises or consists of SEQ ID NO: 371.

[0593] In some embodiments of the compositions of the disclosure, the second RNA binding protein comprises or consists of an Excision Repair Cross-Complementation Group 1 (ERCC1) polypeptide. In some embodiments, the ERCC1 polypeptide comprises or consists of SEQ ID NO: 372.

[0594] In some embodiments of the compositions of the disclosure, the second RNA binding protein comprises or consists of a ras-related C3 botulinum toxin substrate 1 isoform (RAC1) polypeptide. In some embodiments, the RAC1 polypeptide comprises or consists of SEQ ID NO: 373.

[0595] In some embodiments of the compositions of the disclosure, the second RNA binding protein comprises or consists of a Ribonuclease A A1 (RAA1) polypeptide. In some embodiments, the RAA1 polypeptide comprises or consists of SEQ ID NO: 374.

[0596] In some embodiments of the compositions of the disclosure, the second RNA binding protein comprises or consists of a Ras Related Protein (RAB1) polypeptide. In some embodiments, the RAB1 polypeptide comprises or consists of SEQ ID NO: 375.

[0597] In some embodiments of the compositions of the disclosure, the second RNA binding protein comprises or consists of a DNA Replication Helicase/Nuclease 2 (DNA2) polypeptide. In some embodiments, the DNA2 polypeptide comprises or consists of SEQ ID NO: 376.

[0598] In some embodiments of the compositions of the disclosure, the second RNA binding protein comprises or consists of a FLJ35220 polypeptide. In some embodiments, the FLJ35220 polypeptide comprises or consists of SEQ ID NO: 377.

[0599] In some embodiments of the compositions of the disclosure, the second RNA binding protein comprises or consists of a FLJ13173 polypeptide. In some embodiments, the FLJ13173 polypeptide comprises or consists of SEQ ID NO: 378.

[0600] In some embodiments of the compositions of the disclosure, the second RNA binding protein comprises or consists of Teneurin Transmembrane Protein (TENM) polypeptide. In some embodiments, the second RNA binding protein comprises or consists of Teneurin Transmembrane Protein 1 (TENM1) polypeptide. In some embodiments, the TENM1 polypeptide comprises or consists of SEQ ID NO: 379.

[0601] In some embodiments, the second RNA binding protein comprises or consists of Teneurin Transmembrane Protein 2 (TENM2) polypeptide. In some embodiments, the TENM2 polypeptide comprises or consists of SEQ ID NO: 380.

In some embodiments of the compositions of the disclosure, the second RNA binding protein comprises or consists of a Ribonuclease Kappa (RNaseK) polypeptide. In some embodiments, the RNaseK polypeptide comprises or consists of SEQ ID NO: 381.

[0602] In some embodiments of the compositions of the disclosure, the second RNA binding protein comprises or consists of a transcription activator-like effector nuclease (TALEN) polypeptide or a nuclease domain thereof. In some embodiments, the TALEN polypeptide comprises or consists of SEQ ID NO: 382. In some embodiments, the TALEN polypeptide comprises or consists of SEQ ID NO: 383.

[0603] In some embodiments of the compositions of the disclosure, the second RNA binding protein comprises or consists a zinc finger nuclease polypeptide or a nuclease domain thereof. In some embodiments, the second RNA binding protein comprises or consists of a ZNF638 polypeptide or a nuclease domain thereof. In some embodiments, the ZNF638 polypeptide comprises or consists of SEQ ID NO: 384.

[0604] In some embodiments of the compositions of the disclosure, the second RNA binding protein comprises or consists of a PIN domain derived from the human SMG6 protein, also commonly known as telomerase-binding protein EST1A isoform 3, NCBI Reference Sequence: NP_001243756.1. In some embodiments, the PIN from hSMG6 is used herein in the form of a Cas fusion protein and as an internal control, for example, and without limitation. In some embodiments, the PIN polypeptide comprises or consists of SEQ ID NO: 626.

[0605] In some embodiments of the compositions of the disclosure, the composition further comprises (a) a sequence comprising a gRNA that specifically binds within an RNA molecule and (b) a sequence encoding a nuclease. In some embodiments, a nuclease comprises a sequence isolated or derived from a CRISPR/Cas protein. In some embodiments, a nuclease comprises a sequence isolated or derived from a TALEN or a nuclease domain thereof. In some embodiments, a nuclease comprises a sequence isolated or derived from a zinc finger nuclease or a nuclease domain thereof.

### AAV Vectors

[0606] An “AAV vector” as used herein refers to a vector comprising, consisting essentially of, or consisting of one or more nucleic acid molecules and one or more AAV inverted terminal repeat sequences (ITRs). In some aspects, the nucleic acid molecule encodes for a CAG-repeat targeting protein and/or composition of the disclosure. Such AAV vectors can be replicated and packaged into infectious viral particles when present in a host cell that provides the functionality of rep and cap gene products, for example, by transfection of the host cell. In some aspects, AAV vectors contain a promoter, at least one nucleic acid that may encode at least one protein or RNA, and/or an enhancer and/or a terminator within the flanking ITRs that is packaged into the infectious AAV particle. The encapsidated nucleic acid portion may be referred to as the AAV vector genome. Plasmids containing AAV vectors may also contain elements for manufacturing purposes, e.g., antibiotic resistance genes, origin of replication sequences etc., but these are not encapsidated and thus do not form part of the AAV particle.

[0607] In some aspects, an AAV vector can comprise at least one nucleic acid molecule encoding a CAG-repeat targeting composition of the disclosure. In some aspects, an AAV vector can comprise at least one regulatory sequence. In some aspects, an AAV vector can comprise at least one AAV inverted terminal (ITR) sequence. In some aspects, an AAV vector can comprise a first ITR sequence and a second ITR sequence. In some aspects, an AAV vector can comprise at least one promoter sequence. In some aspects, an AAV vector can comprise at least one enhancer sequence. In some aspects, an AAV vector can comprise at least one polyA sequence. In some aspects, an AAV vector can comprise at least one linker sequence. In some aspects, an AAV vector of the disclosure can comprise at least on nuclear localization signals. In some aspects, an AAV vector of the disclosure can comprise a CAG-repeat targeting PUF or PUMBY protein, peptide, or fragment thereof. In some aspects, an AAV vector of the disclosure can comprise a Cas protein, peptide, or fragment thereof. In some aspects, an AAV vector of the disclosure can comprise an endonuclease protein, peptide, or fragment thereof. In some aspects, an AAV vector of the disclosure can comprise a guide RNA, in some cases a CAG-repeat targeting guide RNA. In some aspects, AAV vectors of the disclosure can comprise a fusion protein comprising one or more elements of the disclosure, including, but not limited to, a CAG-repeat targeting protein (such as a Cas, PUF, or PUMBY) and an endonuclease. Optionally, fusion proteins of the AAV vector can further comprise a linker amino acid sequence between the one or more elements of the disclosure.

[0608] In some aspects, a AAV vector can comprise a first AAV ITR sequence, a promoter sequence, a CAG-repeat targeting composition nucleic acid molecule, a regulatory sequence and a second AAV ITR sequence. In some aspects, an AAV vector can comprise, in the 5′ to 3′ direction, a first AAV ITR sequence, a promoter sequence, a transgene nucleic acid molecule, and a second AAV ITR sequence.

### CAG-Targeting Cas13d Vectors

[0609] In some embodiments of the compositions of the disclosure, CAG-targeting Cas13d compositions are packaged as AAV vectors. In some embodiments, CAG-targeting Cas13d compositions packaged as AAV vectors are set forth in SEQ ID NOs 518, 528, 534, 536, and 539.

[0610] In some embodiments, an AAV vector comprising a CAG-targeting Cas13d composition comprises from 5′ to 3′: a human U6 promoter, a cas13d gRNA, wherein the gRNA comprises a direct repeat sequence and a CAG targeting spacer sequence, an EFS promoter, a kozak sequence, a SV40 NLS sequence, a linker sequence, a sequence encoding Cas13d, a linker sequence, a SV40 NLS sequence, a linker sequence, an HA tag sequence, and a BGH poly a sequence.

[0611] In some embodiments, a nucleic acid encoding a CAG-targeting Cas13d composition is set forth in SEQ ID NO: 518. In some embodiments, the CAG-targeting Cas13d composition is arranged as depicted in Table 3.

TABLE 3
CAG-targeting Cas13d composition for packaging in AAV unitary
vectors

| Plasmid | |
|---|---|
| Element | Nucleic Acid Sequences |
| Human U6 | gagggcctatttcccatgattccttcatatttgcatatacgatacaaggctgttagagagataattggaattaatttgactgtaaa |
| promoter | cacaaagatattagtacaaaatacgtgacgtagaaagtaataatttcttgggtagtttgcagttttaaaattatgttttaaaatgg |
| | actatcatatgcttaccgtaacttgaaagtatttcgatttcttggctttatatatcttGTGGAAAGGACGAAACACC (SEQ ID |
| | NO: 519) |
| CasRx direct | AACCCCTACCAACTGGTCGGGGTTTGAAAC (SEQ ID NO: 302) |
| repeat (DR) | |
| Spacer (CTG | ctgctgctgctgctgctgctgctgct (SEQ ID NO: 459) |
| guide 3) | |
| EFS promoter | TAGGTCTTGAAAGGAGTGGGAATTGGCTCCGGTGCCCGTCAGTGGGCAGAGCGCA |
| | CATCGCCCACAGTCCCCGAGAAGTTGGGGGGAGGGGTCGGCAATTGATCCGGTGC |
| | CTAGAGAAGGTGGCGCGGGGTAAACTGGGAAAGTGATGTCGTGTACTGGCTCCGC |
| | CTTTTTCCCGAGGGTGGGGGAGAACCGTATATAAGTGCAGTAGTCGCCGTGAACGT |
| | TCTTTTTCGCAACGGGTTTGCCGCCAGAACACAGG (SEQ ID NO: 520) |
| Kozak | AGAACCATG (SEQ ID NO: 546) |
| Sequence | |
| SV-40 NLS | CCCAAGAAgAAGAGAAAGGTG (SEQ ID NO: 524) |
| Linker | GAGGCCAGC (SEQ ID NO: 521) |
| CasRx | ATCGAAAAAAAAAAGTCCTTCGCCAAGGGCATGGGCGTGAAGTCCACACTCGTGT |
| | CCGGCTCCAAAGTGTACATGACAACCTTCGCCGAAGGCAGCGACGCCAGGCTGGA |
| | AAAGATCGTGGAGGGCGACAGCATCAGGAGCGTGAATGAGGGCGAGGCCTTCAG |
| | CGCTGAAATGGCCGATAAAAACGCCGGCTATAAGATCGGCAACGCCAAATTCAGC |
| | CATCCTAAGGGCTACGCCGTGGTGGCTAACAACCCTCTGTATACAGGACCCGTCCA |
| | GCAGGATATGCTCGGCCTGAAGGAAACTCTGGAAAAGAGGTACTTCGGCGAGAGC |
| | GCTGATGGCAATGACAATATTTGTATCCAGGTGATCCATAACATCCTGGACATTGA |
| | AAAAATCCTCGCCGAATACATTACCAACGCCGCCTACGCCGTCAACAATATCTCCG |
| | GCCTGGATAAGGACATTATTGGATTCGGCAAGTTCTCCACAGTGTATACCTACGAC |
| | GAATTCAAAGACCCCGAGCACCATAGGGCCGCTTTCAACAATAACGATAAGCTCA |
| | TCAACGCCATCAAGGCCCAGTATGACGAGTTCGACAACTTCCTCGATAACCCCAGA |
| | CTCGGCTATTTCGGCCAGGCCTTTTTCAGCAAGGAGGGCAGAAATTACATCATCAA |
| | TTACGGCAACGAATGCTATGACATTCTGGCCCTCCTGAGCGGACTGAGGCACTGGG |
| | TGGTCCATAACAACGAAGAAGAGTCCAGGATCTCCAGGACCTGGCTCTACAACCT |
| | CGATAAGAACCTCGACAACGAATACATCTCCACCCTCAACTACCTCTACGACAGG |
| | ATCACCAATGAGCTGACCAACTCCTTCTCCAAGAACTCCGCCGCCAACGTGAACTA |
| | TATTGCCGAAACTCTGGGAATCAACCCTGCCGAATTCGCCGAACAATATTTCAGAT |
| | TCAGCATTATGAAAGAGCAGAAAAACCTCGGATTCAATATCACCAAGCTCAGGGA |
| | AGTGATGCTGGACAGGAAGGATATGTCCGAGATCAGGAAAAATCATAAGGTGTTC |
| | GACTCCATCAGGACCAAGGTCTACACCATGATGGACTTTGTGATTTATAGGTATTA |
| | CATCGAAGAGGATGCCAAGGTGGCTGCCGCCAATAAGTCCCTCCCCGATAATGAG |
| | AAGTCCCTGAGCGAGAAGGATATCTTTGTGATTAACCTGAGGGGCTCCTTCAACGA |
| | CGACCAGAAGGATGCCCTCTACTACGATGAAGCTAATAGAATTTGGAGAAAGCTC |
| | GAAAATATCATGCACAACATCAAGGAATTTAGGGGAAACAAGACAAGAGAGTAT |
| | AAGAAGAAGGACGCCCCTAGACTGCCCAGAATCCTGCCCGCTGGCCGTGATGTTT |
| | CCGCCTTCAGCAAACTCATGTATGCCCTGACCATGTTCCTGGATGGCAAGGAGATC |
| | AACGACCTCCTGACCACCCTGATTAATAAATTCGATAACATCCAGAGCTTCCTGAA |
| | GGTGATGCCTCTCATCGGAGTCAACGCTAAGTTCGTGGAGGAATACGCCTTTTTCA |
| | AAGACTCCGCCAAGATCGCCGATGAGCTGAGGCTGATCAAGTCCTTCGCTAGAAT |
| | GGGAGAACCTATTGCCGATGCCAGGAGGGCCATGTATATCGACGCCATCCGTATTT |
| | TAGGAACCAACCTGTCCTATGATGAGCTCAAGGCCCTCGCCGACACCTTTTCCCTG |
| | GACGAGAACGGAAACAAGCTCAAGAAAGGCAAGCACGGCATGAGAAATTTCATT |
| | ATTAATAACGTGATCAGCAATAAAAGGTTCCACTACCTGATCAGATACGGTGATCC |
| | TGCCCACCTCCATGAGATCGCCAAAAACGAGGCCGTGGTGAAGTTCGTGCTCGGC |
| | AGGATCGCTGACATCCAGAAAAAACAGGGCCAGAACGGCAAGAACCAGATCGAC |
| | AGGTACTACGAAACTTGTATCGGAAAGGATAAGGGCAAGAGCGTGAGCGAAAAG |
| | GTGGACGCTCTCACAAAGATCATCACCGGAATGAACTACGACCAATTCGACAAGA |
| | AAAGGAGCGTCATTGAGGACACCGGCAGGGAAAACGCCGAGAGGGAGAAGTTTA |
| | AAAAGATCATCAGCCTGTACCTCACCGTGATCTACCACATCCTCAAGAATATTGTC |
| | AATATCAACGCCAGGTACGTCATCGGATTCCATTGCGTCGAGCGTGATGCTCAACT |
| | GTACAAGGAGAAAGGCTACGACATCAATCTCAAGAAACTGGAAGAGAAGGGATT |
| | CAGCTCCGTCACCAAGCTCTGCGCTGGCATTGATGAAACTGCCCCCGATAAGAGA |
| | AAGGACGTGGAAAAGGAGATGGCTGAAAGAGCCAAGGAGAGCATTGACAGCCTC |
| | GAGAGCGCCAACCCCAAGCTGTATGCCAATTACATCAAATACAGCGACGAGAAGA |
| | AAGCCGAGGAGTTCACCAGGCAGATTAACAGGGAGAAGGCCAAAACCGCCCTGA |
| | ACGCCTACCTGAGGAACACCAAGTGGAATGTGATCATCAGGGAGGACCTCCTGAG |
| | AATTGACAACAAGACATGTACCCTGTTCAGAAACAAGGCCGTCCACCTGGAAGTG |
| | GCCAGGTATGTCCACGCCTATATCAACGACATTGCCGAGGTCAATTCCTACTTCCA |
| | ACTGTACCATTACATCATGCAGAGAATTATCATGAATGAGAGGTACGAGAAAAGC |
| | AGCGGAAAGGTGTCCGAGTACTTCGACGCTGTGAATGACGAGAAGAAGTACAACG |
| | ATAGGCTCCTGAAACTGCTGTGTGTGCCTTTCGGCTACTGTATCCCCAGGTTTAAG |
| | AACCTGAGCATCGAGGCCCTGTTCGATAGGAACGAGGCCGCCAAGTTCGACAAGG |
| | AGAAAAAGAAGGTGTCCGGCAATTCC (SEQ ID NO: 144) |
| SV-40 poly A | AACTTGTTTATTGCAGCTTATAATGGTTACAAATAAAGCAATAGCATCACAAATTT |
| | CACAAATAAAGCATTTTTTTCACTGCATTCTAGTTGTGGTTTGTCCAAACTCATCAA |
| | TGTATCTTA (SEQ ID NO: 533) |

[0612] In some embodiments, a CAG-targeting Cas13d composition comprises from N- to C-terminus: a human U6 promoter, a cas3d gRNA, wherein the gRNA comprises a direct repeat sequence and a CAG targeting spacer sequence, an EFS promoter, a kozak sequence, a sequence encoding Cas13d, a linker sequence, a SV40 NLS sequence, and a SV40 poly a sequence. In some embodiments, a nucleic acid encoding a CAG-targeting Cas13d composition is set forth in SEQ ID NO: 528. In some embodiments, the CAG-targeting Cas13d composition is arranged as depicted in Table 4.

TABLE 4
CAG-targeting Cas13d composition for packaging in AAV unitary
vectors

| Plasmid Element | Nucleic Acid Sequences |
|---|---|
| Human U6 promoter | GAGGGCCTATTTCCCATGATTCCTTCATATTTGCATATACGATACAAGGCTGTTAG |
| | AGAGATAATTAGAATTAATTTGACTGTAAACACAAAGATATTAGTACAAAATACG |
| | TGACGTAGAAAGTAATAATTTCTTGGGTAGTTTGCAGTTTTAAAATTATGTTTTAA |
| | AATGGACTATCATATGCTTACCGTAACTTGAAAGTATTTCGATTTCTTGGCTTTATA |
| | TATCTTGTGGAAAGGACGAAACACC (SEQ ID NO: 519) |
| Seq198 direct repeat | Caagtaaacccctaccaagtggtcggggtttgaaac (SEQ ID NO: 199) |
| (DR) | |
| Spacer (CTG guide 3) | ctgctgctgctgctgctgctgctgct (SEQ ID NO: 459) |
| EFS promoter | TAGGTCTTGAAAGGAGTGGGAATTGGCTCCGGTGCCCGTCAGTGGGCAGAGCGCA |
| | CATCGCCCACAGTCCCCGAGAAGTTGGGGGGAGGGGTCGGCAATTGATCCGGTGC |
| | CTAGAGAAGGTGGCGCGGGGTAAACTGGGAAAGTGATGTCGTGTACTGGCTCCGC |
| | CTTTTTCCCGAGGGTGGGGGAGAACCGTATATAAGTGCAGTAGTCGCCGTGAACGT |
| | TCTTTTTCGCAACGGGTTTGCCGCCAGAACACAGG (SEQ ID NO: 520) |
| Kozak Sequence | gccgccaccATG (SEQ ID NO: 529) |
| Cas13d Seq198 | ATCGAAAAGAAGAAGAGCTACGCTAAAGGAATGGGCCTGAAAAGCACCATCGTGT |
| | CCGGCTCTAAAGTGTACATGACAACCTTCGGCGATGGCAGCGAGGCCAGACTGGA |
| | GAAGGTGGTTGAGAACGATAGCATCAAGACCCTGCACGAGGGCGAGGCCTTCAGC |
| | GCTGAGATGACCGACAACAACGCCGGCTATAAGATCGGAAACGTGAAGTTCTCCC |
| | ACCCTAACGGCTACGACGTGGTCGCCAACAACCCTTTCTACACCGGCCCTGTGCAG |
| | CAGGACATGCTGGGCCTGAAAGAAATCCTGGAAAGACGGTACTTTGGATCTAGCA |
| | CAGACGGTAACAATACCATCTGCATCCAAATCATCCACAATATCCTGGATATCGAA |
| | AAAATTCTGGCAGAGTACATCACAAACGCAGTGTACGCCACCAACAACATCATCG |
| | ATCCTGATAACGACGTGATCGGCGGCAAGAAGTTCACCAGCATTAAAACCTTCGC |
| | CCAGTTCTCCGCCAGCGACAGCAGCAACGATTTCGAGCAGTTCCTGAAAAATCCCA |
| | GACTCGGCTACCTGGGCAAAGCCTTTTTCTACAAGGACGGCAAGCGGAACAACAG |
| | ACAGAAGGATCCTATCGAGTGTTACCACCTGCTGGCCCTGCTGTGCGGCCTGCGTA |
| | ATTGGGTTGTGCACAACAACGAGGAAAAGGACCTGATCAAGTACACCTGGTTGTA |
| | TAACCTGGACAAGTACCTGGATGCCGAGTACATCACCACCCTGAACTACATGTACA |
| | ACGACATCGGCGACGAGTTGACGGACTCTTTCTCCAAGAACAGCGCCGCCAATAT |
| | CAACTACATCGCCGAGACCCTGGGAATCGACCCCAAGACCTTCGCCGAGCAATAC |
| | TTCCGGTTCTCTATCATGAAGGAACAGAAAAACCTGGGATTCAACCTGACCAAGCT |
| | GAGAGAGGTGATGCTGGACCGGAAGGACATGAGCGAGATCAGAGAGAACCACAA |
| | CGACTTCGATTCTATCAGAGCCAAGGTGTACACAATGATGGACTTCGTGATCTATC |
| | GGTACTACATCGAAGAGGCCGCTAAGGTGAACGCCGCCAACAAGAGCCTGCCCGA |
| | CAACGAGAAGAGCCTGAGCGAGAAAGACATCTTCGTGATTTCACTCAGAGGCAGC |
| | TTCAACGAAGATCAGAAGGATCGGCTGTACTACGACGAGGCGCAAAGACTGTGGT |
| | CCAAGGTGGGCAAACTGATGCTGAAAATCAAGAAGTTCCGGGGCAAGGACACCAG |
| | AAAGTACAAGAATATGGGCACACCTAGAATCCGGAGGCTGATCCCTGAGGGCAGA |
| | GATATCAGCACCTTCTCCAAGCTGATGTACGCTCTGACTATGTTCCTGGACGGCAA |
| | GGAGATCAATGACCTGCTGACCACACTGATCAACAAATTCGACAACATCCAGAGC |
| | TTCTTAAAGGTGATGCCTCTGATCGGCGTGAACGCCAAATTTGCCGAAGAATATAG |
| | TTTCTTCAACAACTCTGAAAAAATCGCCGACGAACTGCGGCTGATCAAGAGCTTTG |
| | CTAGAATGGGAGAACCCGTGGCTGACGCCAGAAGAGCCATGTATATCGACGCAAT |
| | TCGCATCCTGGGCACCGATCTCTCCGACGACGAGCTGAAGGCCCTGGCTGATTCTT |
| | TTAGCCTGGACGAGAACGGCAATAAGCTGGGGAAGGGCAAGCACGGCATGAGAA |
| | ACTTCATCATTAACAACGTGATAACAAATAAGAGATTCCACTACCTGATCCGGTAC |
| | GGCAACCCAGTCCACCTGCATGAGATCGCCAAGAATGAAGCCGTGGTCAAGTTTG |
| | TGCTGGGAAGAATCGCCGATATCCAGAAGAAACAGGGCCAGAACGGCAAGAACC |
| | AGATCGATAGATACTACGAGACATGCATCGGCAAGGACTCTTCTAAAAGCGTGGC |
| | CGAGAAGGTGAACGCCCTGACCAAGATCATCACAGGCATGAACTACGACCAGTTC |
| | GACAGCAGACGGAACGTGATCGAAAACACCGGCGCCGGCAACGCCGAGAGAGAA |
| | AAGTACAAGAAGATCATCAGCCTGTACCTGACAGTGATCTACCACATCCTGAAGA |
| | ACATTGTTAATATCAACTCAAGATACGTGATCGGATTTCACTGCGTGGAGAGAGAT |
| | GCCCAGCTGTATAAGGAAAAGGGCTACGACATTAATCTGAAAAAGCTGAAAGACA |
| | AGGGATTCACAAGCGTGACCAAGCTGTGCGCCGGAATCGACGAGGAATGCAAGGA |
| | CGTCGAAAAGGAAATGACCGAGCGGGCCAAGGCCTCTTTCGCTGCCCTGGAAACC |
| | GCCAACCCCAAGCTGTACGCCACATACATCAACTACTCTGATGAAGAGAAGAATG |
| | CCGAACTGAGAAAGCAGATCAATAGAGAGAAGGCCAAAACCGCCCTGAACGCTC |
| | ATCTGCGCAACACCAAGTGGAACGTGATCATCCGGGAAGATCTTCTGAGAAGAGA |
| | TAACAAGGCTTGTAAAATCTTCAGAAATAAGGTCGCCCACCTGGAGGCCATCCGA |
| | TACGCTCACCTGTACATCAACGACATCGCTGAGGTGAATAGCTATTTTCAGTTTTA |
| | CCACTACATCATGCAGCGGAGGATCATGGCCGAACGGTACGACAAGAGCAGCGGC |
| | AAGGTTAGAGAATACTTCGACGCCGTGAACAATGAGAAAAAATACAACGATAGAC |
| | TGCTGAAGCTCCTCTGTGTGCCATTCGGCTACTGCATCCCTAGATTCAAGAATCTG |
| | AGCATCGAGGCCCTGTTCGACATGAACGAGGCCGTGAAGTTTGATAAGGAAAAGA |
| | AG (SEQ ID NO: 530) |
| Linker | GGATCC (SEQ ID NO: 531) |
| SV40 NLS | CCCAAAAAAAAAAGGAAGGTG (SEQ ID NO: 532) |
| SV-40 poly A | AACTTGTTTATTGCAGCTTATAATGGTTACAAATAAAGCAATAGCATCACAAATTT |
| | CACAAATAAAGCATTTTTTTCACTGCATTCTAGTTGTGGTTTGTCCAAACTCATCAA |
| | TGTATCTTA (SEQ ID NO: 533) |

[0613] In some embodiments, an AAV vector comprising a CAG-targeting Cas13d composition comprises from 5′ to 3′: a human U6 promoter, a cas13d gRNA, wherein the gRNA comprises a direct repeat sequence and a CAG targeting spacer sequence, an EFS promoter, a kozak sequence, a sequence encoding Cas13d, a linker sequence, a SV40 NLS sequence, and an SV40 poly a sequence. In some embodiments, a nucleic acid encoding a CAG-targeting Cas13d composition is set forth in SEQ ID NO: 534. In some embodiments, the CAG-targeting Cas13d composition is arranged as depicted in Table 5.

TABLE 5
CAG-targeting Cas13d composition for packaging in AAV unitary
vectors

| Plasmid Element | Nucleic Acid Sequences |
|---|---|
| Human U6 promoter | GAGGGCCTATTTCCCATGATTCCTTCATATTTGCATATACGATACAAGGCTGTTAG |
| | AGAGATAATTAGAATTAATTTGACTGTAAACACAAAGATATTAGTACAAAATACG |
| | TGACGTAGAAAGTAATAATTTCTTGGGTAGTTTGCAGTTTTAAAATTATGTTTTAA |
| | AATGGACTATCATATGCTTACCGTAACTTGAAAGTATTTCGATTTCTTGGCTTTATA |
| | TATCTTGTGGAAAGGACGAAACACC (SEQ ID NO: 519) |
| Seq179 direct repeat | Actatagccctgccggaaatgacagggttctacaac (SEQ ID NO: 180) |
| (DR) | |
| Spacer (CTG guide 3) | ctgctgctgctgctgctgctgctgct (SEQ ID NO: 459) |
| EFS promoter | TAGGTCTTGAAAGGAGTGGGAATTGGCTCCGGTGCCCGTCAGTGGGCAGAGCGCA |
| | CATCGCCCACAGTCCCCGAGAAGTTGGGGGGAGGGGTCGGCAATTGATCCGGTGC |
| | CTAGAGAAGGTGGCGCGGGGTAAACTGGGAAAGTGATGTCGTGTACTGGCTCCGC |
| | CTTTTTCCCGAGGGTGGGGGAGAACCGTATATAAGTGCAGTAGTCGCCGTGAACGT |
| | TCTTTTTCGCAACGGGTTTGCCGCCAGAACACAGG (SEQ ID NO: 520) |
| Kozak Sequence | gccgccaccATG (SEQ ID NO: 529) |
| Cas 13d Seq179 | GCCAAAAAGAAGAAAACCGCTCGCCAACTGAGAGAAGAAATGCAACAACAGCGG |
| | AAACAGGCCATTCAGAAGCAACAAGAACAGAGACAAGAGAAAGCCGCCGCCGCT |
| | CGCGAGACAGCCGCCCCCGAACAGCCTGCTGCCGCTCCTGTGCCAAAGCGGCAAA |
| | GAAAATCTCTGGCCAAAGCCGCCGGACTGAAGTCCAACTTCATCTTGGACCCACA |
| | GAGAAGAACAACAGTGATGACAGCTTTTGGCCAGGGCAGCACCGCCATCCTGGAG |
| | AAGCAGATCGTGGACAGAGCCATCAGCGACCTGCAGCCGGTTCAGCAGTTCCAAG |
| | TGGAACCTGCCAGTGCCGCCAAGTACAGGCTGAAGAATAGCCGGGTGAGATTCCC |
| | CAACGTGACAGCTGACGATCCTCTGTATAGACGGAAGGATGGCGGCTTCGTGCCT |
| | GGCATGGACGCCCTCAGAAGAAAGAACGTACTGGAACAGAGATTCTTCGGCAAGT |
| | CTTTCGCCGATAACATCCACATCCAGATGATCTACAGCATCCTGGACATCCACAAG |
| | ATCCTCGCTGCCGCGAGCGGCCACATCGTGCACCTGCTCAATATCGTGAATGGCTC |
| | AAAAGATAGAGACTTCATCGGCATGCTGGCCGCCCACGTGCTGTACAATGAGCTG |
| | AACGAGGAGGCCAAGCGGAGCATCGCCGACTTTTGCAAGAGTCCCAGACTGATCT |
| | ACTACTCTGCTGCTTTCTACGAGACATTGGACAACGGCAAGAGCGAGCGACGGTCT |
| | AACGAGGACATCTTCAACATCCTGGCCCTGATGACCTGTCTGAGAAATTTCAGCAG |
| | CCACCACAGCATCGCCATCAAGGTGAAGGACTACAGCGCCGCTGGCCTGTACAAC |
| | CTGCGGAGACTGGGACCTGACATGAAGAAAATGCTGGACACCTTCTACACCGAGG |
| | CCTTCATCCAGCTTAACCAGAGCTTCCAGGACCACAACACCACAAACCTGACATGT |
| | CTGTTCGATATCCTGAACATCTCTGATAGCGCCAGACAGAAGCAGCTGGCTGAGG |
| | AATTTTATAGATACGTGGTGTTCAAGGAACAAAAGAACTTGGGATTCTCCGTGCGG |
| | AAGCTGAGAGAGGAAATGCTGCTGCTGCCAGACGCTGCCGTGATCGCCGATAAGC |
| | GGTACGACACCTGCAGATCCAAGCTGTACAACCTGATGGACTTCCTGATCCTGAGA |
| | GTGTACAGAACCGGCAGAGCCGACAGATGCGACAAGCTGCCTGAGGCCCTGCGGG |
| | CCGCCCTGACCGACGAGGAAAAGGCCGTGGTGTACCACAAAGAAGCCCTGAGCCT |
| | GTGGAACGAGATGAGAACCCTGATCCTCGACGGCCTGCTGCCTCAGATGACACCT |
| | GAGAACCTGAGCAGACTGTCCGGTCAGAAAAGAAAGGGCGAACTGTCTCTGGATG |
| | ACGCCATGCTGAAAGAGTGCCTGTACGAGCCCGGACCTGTGCCCGAGGATGCTGC |
| | CCCTGAGGAAGCCAACGCCGAGTACTTCTGCCGGATGATCTACCTGGCCACCCTGT |
| | TTATGGATGGCAAGGAGATCAACACCCTGCTGACCACCCTGATTAGCAAATTCGA |
| | GAACATCGCCGCCTTCCTGCAGACCATGGAACAGCTGAACATCGAGGCCGAGCTG |
| | GGCCCTGAATACGCCATGTTTACCAGAAGCAGAGCCGTAGCCGAGCAGCTGAGAG |
| | TGATCAACAGCTTCGCCCTGATGAAGAAGCCTCAGGTGAATGCCAAGCAGCAGCT |
| | GTACAGAGCCGCTGTCACCCTGCTGGGAACAGAGGACCCTGACGGCGTGACCGAT |
| | GAGATGCTGTGCATCGACCCCGTGACCGGCAAGATGCTGCCTCCTAACCAGAGGC |
| | ATCATGGCGACACCGGCTTACGGAACTTCATCGCAAACAACGTGGTGGAAAGCCG |
| | GAGATTCCAGTACTTAATCCGGTACAGCGATCCTGCTCAGCTGCACCAGCTCGCCA |
| | GCAACAAGAAGCTGGTCAGATTCGTGCTGAGCAGCATCCCCGACACACAGATCAA |
| | CAGATACTATGAAACCTGTGGCCAGACCAGACTGGCCGGCAGAGCCGCCAAGGTG |
| | GAATTCCTGACAGACATGATTGCCGCCATCAGATTCGACCAGTTTCGGGATGTCAA |
| | TCAGAAAGAGCGCGGCGCCAATACTCAGAAAGAAAGATATAAGGCCATGCTTGGC |
| | CTGTACCAGACCGTGCTGTACCTGGCTGTTAAAAATCTGGTGAACATTAACGCCAG |
| | ATACGTGATGGCCTTCCACTGCGTGGAGCGGGATATGTTTCTGTATGACGGCGAGC |
| | TGACAGATCCCAAGGGCGAGAGCGTGTCTGCTTTCCTGGCTGTGAATGGAAAGAA |
| | GGGCGTGCAGCCTCAGTACCTGCTGCTGACCCAGCTGTTTATCCGGCGGGATTACC |
| | TTAAGCGGAGTGCATGCGAGCAGATCCAGCACAACATGGAAAACATCTCCGACCG |
| | GCTGCTGCGGGAATACCGGAACGCCGTCGCCCACCTGAATGTGATAGCCCATCTG |
| | GCTGACTACTCTGCCGACATGAGAGAAATCACCAGCTACTACGGCTTGTATCACTA |
| | CCTGATGCAGAGACACCTCTTCAAAAGACACGCCTGGCAGATCAGACAGCCTGAA |
| | AGGCCAACTGAGGAGGAACAGAAGCTCATCGAGCAGGAGCAGAAGCAGCTGGCC |
| | TGGGAGAAGGCCCTGTTTGACAAGACCCTGCAGTACCACAGCTACAACAAGGACC |
| | TGGTGAAGGCTCTTAACGCCCCCTTCGGATACAACCTGGCAAGATACAAGAACCT |
| | GTCTATCGAGCCTCTGTTCAGCAAAGAAGCCGCTCCTGCCGCCGAGATCAAGGCCA |
| | CACACGCC (SEQ ID NO: 535) |
| Linker | GGATCC (SEQ ID NO: 531) |
| SV40 NLS | CCCAAAAAAAAAAGGAAGGTG (SEQ ID NO: 532) |
| SV-40 poly A | AACTTGTTTATTGCAGCTTATAATGGTTACAAATAAAGCAATAGCATCACAAATTT |
| | CACAAATAAAGCATTTTTTTCACTGCATTCTAGTTGTGGTTTGTCCAAACTCATCAA |
| | TGTATCTTA (SEQ ID NO: 533) |

[0614] In some embodiments, an AAV vector comprising a CAG-targeting Cas13d composition comprises from 5′ to 3′: a human U6 promoter, a cas13d gRNA, wherein the gRNA comprises a direct repeat sequence and a CAG targeting spacer sequence, an EFS promoter, a kozak sequence, a sequence encoding Cas13d, a linker sequence, an SV40 NLS sequence, and anSV40 poly a sequence. In some embodiments, a nucleic acid encoding a CAG-targeting Cas13d composition is set forth in SEQ ID NO: 536. In some embodiments, the CAG-targeting Cas13d composition is arranged as depicted in Table 6.

TABLE 6
CAG-targeting Cas13d composition for packaging in AAV unitary
vectors

| Plasmid Element | Nucleic Acid Sequences |
|---|---|
| Human U6 promoter | GAGGGCCTATTTCCCATGATTCCTTCATATTTGCATATACGATACAAGGCTGTTAG |
| | AGAGATAATTAGAATTAATTTGACTGTAAACACAAAGATATTAGTACAAAATACG |
| | TGACGTAGAAAGTAATAATTTCTTGGGTAGTTTGCAGTTTTAAAATTATGTTTTAA |
| | AATGGACTATCATATGCTTACCGTAACTTGAAAGTATTTCGATTTCTTGGCTTTATA |
| | TATCTTGTGGAAAGGACGAAACACC (SEQ ID NO: 519) |
| Seq42 direct repeat | GACCAACACCTCTGCAAAACTGCAGGGGTCTAAAAC (SEQ ID NO: 537) |
| (DR) | |
| Spacer (CTG guide 3) | ctgctgctgctgctgctgctgctgct (SEQ ID NO: 459) |
| EFS promoter | TAGGTCTTGAAAGGAGTGGGAATTGGCTCCGGTGCCCGTCAGTGGGCAGAGCGCA |
| | CATCGCCCACAGTCCCCGAGAAGTTGGGGGGAGGGGTCGGCAATTGATCCGGTGC |
| | CTAGAGAAGGTGGCGCGGGGTAAACTGGGAAAGTGATGTCGTGTACTGGCTCCGC |
| | CTTTTTCCCGAGGGTGGGGGAGAACCGTATATAAGTGCAGTAGTCGCCGTGAACGT |
| | TCTTTTTCGCAACGGGTTTGCCGCCAGAACACAGG (SEQ ID NO: 520) |
| Kozak Sequence | gccgccaccATG (SEQ ID NO: 529) |
| Cas13d Seq42 | AACAATAAGAGAAAGACAAAGGCCAAGGCCGCTGGACTGAAGAGCGTCTTTTTTG |
| | ATCAGAAGCAAGCCGTGCTGACCACATTCGCCAAGGGCAACAACTCCCAGATCGA |
| | GAAGAAAGTGGTCAACAGCGAGGTCAAAGATCTGAGACAGCCTCCCGCCTTTGAT |
| | CTGGAACTGAAGGAGAAGACCTTCTATATCTCCGGCAAGAACAACATTAACACAT |
| | CTAGGGAGAACCCTCTGGCTAGCGCTTCTCTGCCTCTCTCCAAGAGGCAAAGGATT |
| | AGAGCCGAGAGGATCAAGAGAGCTAGAGAAGAAAATAGACCCTACCATAATGTC |
| | AAGAGGGTGGGAGAGGACGATCTGAGAGCCAAGGCTGACCTCGAGAAACACTAC |
| | TTCGGCAAGGAGTACAGCGATAATCTGAAAATTCAGATTATTTATAATATCCTCGA |
| | CATCAACAAAATCATCAGCCCCTATATCAATGACATCGTCTACTCCATGAACAATC |
| | TGGCTAGAAACGACGAGTATATCGATGGAAAAATCGACGTGATCGGCTCCCTCTC |
| | CTCCACCACAGACTACTCCTCCTTCATGAGCCCCAACAAGGATCTGGAAAAGGAA |
| | AAAAAGTTTTCCTTCCATAGAGAAAACTACAAAAAATTCGTCGAGGCCAGCAAGC |
| | CCTACATGAGGTACTATGGAAAGGTGTTTATTAGAGACGTGAAGAAAAGCAAGCT |
| | CTCCACCGGAAAGGGCGAGAAGATTGAGGTGATGTATAGATCCGACGAGGAAATT |
| | TTCACCATTTTTCAAATTCTGAGCTATGTGAGACAATCCATCATGCACAACGACAT |
| | CGGAAACAAGAGCAGCATTCTGGCCATCGAAAAGTACCCCGCCAGATTCGTCGGC |
| | TTTCTGAGCGACCTCCTCAAAACCAAGACAAACGATGTCAATAGAATGTTCATTGA |
| | CAATAACAGCCAAACAAACTTCTGGGTGCTCTTCAGCATCTTCGGACTGCAAGATC |
| | ACACCAGCGGAGCCGACAAGATCTGTAGAAATTTCTACGACTTCGTGATCAAGGC |
| | CGACAGCAAAAACCTCGGATTCTCCCTCAAGAAGATCAGAGAGCTGATGCTCGAT |
| | CTGCCTAACGCCAACATGCTGAGAGATCACCAATTCGATACCGTGAGGAGCAAGT |
| | TTTATACCCTCCTCGACTTCATTATCTATCAACACTATCTCGAGGAGAAGTCCAGA |
| | ATCGACAACATGGTGGAGAAGCTGAGGATGACCCTCAAGGAAGAGGAAAAGGAA |
| | GTGCTCTACGCTGCCGAGGCCAAGATTGTGTGGAATGCCATCGGAGCCAAGGTCA |
| | TCAACAAGCTCGTGCCCATGATGAATGGCGATGCTCTGAAGGAGATCAAGAGAAA |
| | AAATAGAGATAGAAAGCTCCCTCAGAGCGTGATCGCCACAGTGCAAGTGAATTCC |
| | GACGCCAATGTGTTCTCCGGACTGATCTACTTTCTGACACTGTTTCTCGACGGCAA |
| | GGAGATCAACGAGATGGTGAGCAACCTCATCACCAAGTTCGAGAACATTGACTCT |
| | CTGCTGCATGTCGATAGAGAAATCTACAAGTCCGACGAGAAGGATCTGGATCTCG |
| | AGATCGAGAAGCTGGCCCTCTTTTTCAAGGGCGTGGTGAGGCCTAATGCCAAGAC |
| | AGATACCGGCGCCGGAGAGATCTCCAAGAGCTTCTCCATCTTCCAGAGCGCCGAA |
| | AGGATTATCGAGGAACTGAAGTTCATTAAGAACGTCACAAGAATGGATAACGAGA |
| | TCTTCCCTAGCGAGGGCGTGTTCCTCGATGCCGCTAACGTGCTCGGCGTCAGAGGC |
| | GATGACTTTGACTTTAGCAATGAGTTTGTCGGAGACGATCTGCACAGCGACGCTAA |
| | TAAGAAGATTATTAACAAGATCAATGGCACCAAGGAGGACAGAAATCTGAGGAAC |
| | TTTATTATTAATAACGTCGTGAAGAGCAGAAGGTTTCAGTATATCGCTAGACACAT |
| | GAATACACACTACGTCAAGCAGCTCGCCAATAACGAGACACTGAATAGATTCGTG |
| | CTGAACAAGATGGGAGACGCCAAGATCATCAATAGGTACTACGAGTCCATCTCCG |
| | GCAATACCCCCAATATTGAGGTCAGAAGCCAAATCGACTACCTCGTCAAGAGACT |
| | GAGGAGCTTCAGCTTCGAAGACCTCAACGACGTCAAGCAAAAGGTGAGACCCGGC |
| | ACCAATGAGAGCATCGAGAAGGAGAAGAAAAAGGCCCTCGTCGGACTGTGCCTCA |
| | CAATTCAGTACCTCGTGTATAAAAATCTGGTGAATATCAACGCTAGGTACACCACC |
| | GCTTTCTACTGTCTGGAGAGGGACTCCAAACTGAAAGGCTTTGGCGTGGACGTGTG |
| | GAGAGATTTCGAATCCTACACCGCTCTGACCAATCACTTTATCAAAGAAGGCTATC |
| | TGCCCGTGAGAAAGGCTGAAATTCTGAGGGCCAATCTGAAGCATCTGGACTGTGA |
| | AGACGGCTTCAAATATTACAGAAACCAAGTGACCCACCTCAACGCCATTAGAGTC |
| | GCCTATAAATATATCAACGAGATTAAATCCGTGCACAGCTACTTCGCCCTCTACCA |
| | CTACATCATGCAGAGACATCTGTACGACAGCCTCCAAGCCAAAGCTAAGGACTCC |
| | TCCGGCTTCGTGATCGACGCTCTGAAGAAATCCTTCGAGCACAAGATCTACAGCAA |
| | AGATCTGCTCCACGTGCTGCACTCCCCCTTCGGCTATAATACCGCTAGATATAAAA |
| | ATCTGAGCATCGAGGCCCTCTTCGACAAGAACGAATCCAGACCCGAGGTGAATCC |
| | CCTCTCCACCAATGAT (SEQ ID NO: 538) |
| Linker | GGATCC (SEQ ID NO: 531) |
| SV40 NLS | CCCAAAAAAAAAAGGAAGGTG (SEQ ID NO: 532) |
| SV-40 poly A | AACTTGTTTATTGCAGCTTATAATGGTTACAAATAAAGCAATAGCATCACAAATTT |
| | CACAAATAAAGCATTTTTTTCACTGCATTCTAGTTGTGGTTTGTCCAAACTCATCAA |
| | TGTATCTTA (SEQ ID NO: 533) |

[0615] In some embodiments, an AAV vector comprising a CAG-targeting Cas13d composition comprises from 5′ to 3′: a human U6 promoter, a cas13d gRNA, wherein the gRNA comprises a direct repeat sequence and a CAG targeting spacer sequence, an EFS promoter, a kozak sequence, a sequence encoding Cas13d, a linker sequence, an SV40 NLS sequence, and anSV40 poly a sequence. In some embodiments, a nucleic acid encoding a CAG-targeting Cas13d composition is set forth in SEQ ID NO: 539. In some embodiments, the CAG-targeting Cas13d composition is arranged as depicted in Table 7.

TABLE 7
CAG-targeting Cas13d composition for packaging in AAV unitary
vectors

| Plasmid Element | Nucleic Acid Sequences |
|---|---|
| Human U6 promoter | GAGGGCCTATTTCCCATGATTCCTTCATATTTGCATATACGATACAAGGCTGTTAG |
| | AGAGATAATTAGAATTAATTTGACTGTAAACACAAAGATATTAGTACAAAATACG |
| | TGACGTAGAAAGTAATAATTTCTTGGGTAGTTTGCAGTTTTAAAATTATGTTTTAA |
| | AATGGACTATCATATGCTTACCGTAACTTGAAAGTATTTCGATTTCTTGGCTTTATA |
| | TATCTTGTGGAAAGGACGAAACACC (SEQ ID NO: 519) |
| Seq212 direct repeat | gtacaatagccctgcagtaaggcagggttctaAGAC (SEQ ID NO: 213) |
| Spacer (CTG guide 3) | ctgctgctgctgctgctgctgctgct (SEQ ID NO: 459) |
| EFS promoter | TAGGTCTTGAAAGGAGTGGGAATTGGCTCCGGTGCCCGTCAGTGGGCAGAGCGCA |
| | CATCGCCCACAGTCCCCGAGAAGTTGGGGGGAGGGGTCGGCAATTGATCCGGTGC |
| | CTAGAGAAGGTGGCGCGGGGTAAACTGGGAAAGTGATGTCGTGTACTGGCTCCGC |
| | CTTTTTCCCGAGGGTGGGGGAGAACCGTATATAAGTGCAGTAGTCGCCGTGAACGT |
| | TCTTTTTCGCAACGGGTTTGCCGCCAGAACACAGG (SEQ ID NO: 520) |
| Kozak Sequence | gccgccaccATG (SEQ ID NO: 529) |
| Cas13d Seq212 | AAGAAGAAGCACCAGAGCGCCGCCGAGAAGAGGCAAGTGAAGAAGCTCAAGAAT |
| | CAAGAGAAGGCCCAGAAGTACGCTAGCGAGCCTTCCCCCCTCCAGAGCGATACAG |
| | CTGGCGTGGAATGCTCCCAGAAAAAGACAGTCGTCAGCCACATTGCCAGCTCCAA |
| | GACACTGGCCAAGGCTATGGGACTCAAATCCACACTGGTCATGGGCGACAAGCTG |
| | GTCATCACCAGCTTTGCTGCTAGCAAGGCTGTCGGAGGCGCTGGCTACAAAAGCG |
| | CTAACATTGAAAAAATCACAGATCTGCAAGGAAGGGTCATTGAGGAGCACGAAAG |
| | GATGTTTAGCGCCGATGTCGGAGAGAAAAATATCGAACTGAGCAAGAATGACTGC |
| | CACACCAACGTCAACAACCCCGTGGTGACCAACATCGGAAAGGATTACATCGGAC |
| | TGAAATCTAGGCTGGAGCAAGAGTTTTTCGGCAAGACATTCGAGAATGACAATCT |
| | GCATGTGCAGCTGGCCTACAATATCCTCGACATCAAGAAAATTCTGGGAACCTATG |
| | TGAACAATATCATTTATATCTTCTACAATCTGAATAGGGCTGGCACCGGCAGAGAT |
| | GAGAGGATGTATGACGACCTCATCGGCACACTGTACGCTTACAAACCCATGGAGG |
| | CTCAACAGACCTATCTGCTCAAAGGCGACAAGGATATGAGGAGGTTTGAGGAGGT |
| | GAAACAGCTGCTGCAAAACACCTCCGCTTACTATGTGTATTACGGCACACTGTTCG |
| | AGAAGGTGAAGGCTAAGAGCAAGAAGGAACAGAGGGCTAAGGAGGCCGAAATCG |
| | ACGCTTGTACCGCCCATAACTACGATGTGCTGAGACTGCTGTCCCTCATGAGGCAG |
| | CTGTGCATGCACTCCGTCGCTGGAACAGCCTTTAAGCTGGCTGAGTCCGCTCTGTT |
| | CAACATTGAGGATGTGCTCAGCGCCGATCTGAAGGAAATCCTCGATGAAGCCTTCT |
| | CCGGCGCCGTGAACAAGCTCAATGACGGATTCGTGCAGCACTCCGGCAACAATCT |
| | GTACGTGCTCCAGCAGCTGTACCCTAATGAGACCATCGAGAGAATCGCCGAGAAG |
| | TACTACAGACTCACCGTGAGGAAGGAGGATCTGAACATGGGAGTCAACATTAAAA |
| | AGCTGAGGGAGCTGATCGTGGGCCAATACTTTCCCGAGGTCCTCGACAAAGAATA |
| | CGACCTCTCCAAGAATGGAGACAGCGTGGTGACATACAGAAGCAAGATTTATACC |
| | GTGATGAATTACATTCTGCTGTATTACCTCGAGGACCACGACTCCAGCAGAGAAAG |
| | CATGGTCGAAGCTCTGAGACAAAACAGAGAGGGCGATGAAGGCAAGGAGGAGAT |
| | CTATAGACAGTTTGCCAAGAAGGTGTGGAACGGCGTGTCCGGACTGTTTGGCGTGT |
| | GTCTGAACCTCTTCAAGACCGAAAAGAGAAACAAGTTTAGGAGCAAAGTCGCCCT |
| | CCCCGATGTGTCCGGCGCTGCCTATATGCTCTCCTCCGAGAACATCGACTACTTTGT |
| | CAAGATGCTCTTCTTTGTGTGTAAGTTTCTGGATGGCAAAGAAATCAACGAGCTGC |
| | TGTGCGCTCTGATCAACAAATTTGATAATATTGCCGATATTCTGGATGCTGCCGCT |
| | CAATGTGGCTCCTCCGTCTGGTTCGTGGACAGCTATAGGTTCTTCGAGAGATCTAG |
| | GAGGATTAGCGCCCAGATTAGAATCGTGAAGAACATCGCTTCCAAGGATTTTAAG |
| | AAATCCAAGAAGGATTCCGATGAGAGCTACCCCGAGCAGCTGTATCTGGATGCTC |
| | TGGCTCTGCTCGGAGACGTCATCTCCAAGTACAAGCAGAATAGAGATGGCAGCGT |
| | CGTCATCGATGACCAAGGCAATGCCGTGCTGACAGAGCAATACAAGAGGTTTAGA |
| | TATGAATTTTTCGAGGAGATCAAGAGGGACGAAAGCGGCGGCATCAAGTACAAGA |
| | AGTCCGGAAAACCCGAGTACAACCATCAGAGAAGGAATTTTATTCTGAATAATGT |
| | GCTGAAAAGCAAATGGTTTTTCTATGTGGTGAAGTACAATAGGCCCAGCAGCTGC |
| | AGAGAACTGATGAAGAATAAGGAAATTCTGAGGTTCGTGCTGAGAGACATCCCCG |
| | ACTCCCAAGTGAGAAGATACTTTAAGGCCGTCCAAGGAGAGGAAGCTTACGCTAG |
| | CGCCGAAGCTATGAGGACAAGACTGGTCGACGCTCTGTCCCAATTTAGCGTCACA |
| | GCTTGTCTGGATGAAGTGGGCGGCATGACAGACAAGGAATTCGCCTCCCAGAGGG |
| | CCGTCGATAGCAAAGAAAAACTGAGAGCCATCATCAGACTGTATCTGACAGTCGC |
| | CTATCTGATTACCAAGAGCATGGTGAAGGTGAATACAAGGTTTAGCATTGCCTTTA |
| | GCGTGCTGGAGAGGGACTACTATCTGCTCATTGACGGCAAGAAGAAATCCAGCGA |
| | CTACACCGGAGAGGATATGCTGGCTCTGACCAGAAAATTTGTGGGCGAAGATGCT |
| | GGACTGTATAGAGAGTGGAAAGAGAAGAACGCTGAAGCCAAGGACAAATATTTTG |
| | ACAAGGCCGAAAGGAAGAAGGTGCTGAGACAGAACGATAAGATGATCAGAAAGA |
| | TGCACTTCACACCCCACTCCCTCAATTACGTCCAAAAGAATCTCGAAAGCGTCCAG |
| | AGCAACGGACTGGCCGCCGTCATCAAGGAATATAGAAATGCCGTCGCTCACCTCA |
| | ATATCATCAATAGACTGGACGAGTACATTGGCTCCGCTAGGGCTGATAGCTACTAC |
| | TCTCTGTACTGTTACTGCCTCCAAATGTATCTGAGCAAGAACTTCAGCGTGGGCTA |
| | CCTCATCAACGTGCAAAAGCAGCTGGAGGAGCACCACACCTACATGAAGGATCTC |
| | ATGTGGCTGCTCAACATCCCCTTCGCTTACAACCTCGCCAGATACAAAAATCTGTC |
| | CAACGAAAAACTCTTTTACGACGAGGAAGCCGCCGCCGAAAAGGCTGACAAGGCT |
| | GAGAACGAGAGAGGCGAA (SEQ ID NO: 540) |
| Linker | GGAAGC (SEQ ID NO: 531) |
| SV40 NLS | CCCAAGAAGAAAAGGAAGGTC (SEQ ID NO: 532) |
| SV-40 poly A | AACTTGTTTATTGCAGCTTATAATGGTTACAAATAAAGCAATAGCATCACAAATTT |
| | CACAAATAAAGCATTTTTTTCACTGCATTCTAGTTGTGGTTTGTCCAAACTCATCAA |
| | TGTATCTTA (SEQ ID NO: 533) |

[0616] In some embodiments, an AAV vector comprising a nucleic acid encoding a CAG-targeting Cas13d composition comprises from 5′ to 3′: a sequence encoding a 5′ ITR (a first ITR), a sequence encoding an human U6 promoter, a dCas13d seq212 direct repeat, a sequence encoding a CAG guide 3 spacer sequence, a sequence encoding an EFS promoter, a sequence encoding a kozak sequence, a sequence encoding a dCas13d seq212 protein, a sequence encoding a linker sequence, a sequence encoding an SV-40 NLS, a sequence encoding a linker sequence, a sequence encoding an HA tag, a sequence encoding a WPRE, a sequence encoding an SV-40 polyA, and a 3′ ITR (a second ITR). In some embodiments, the CAG-targeting Cas13d composition is arranged as depicted in Table G. In some embodiments, vector A01479 is suitable for blocking. In some aspects, A01479 is encoded by a nucleic acid sequence comprising SEQ ID NO: 588.

[0617] In some embodiments, the vector set forth in Table G is referred to as A01479.

TABLE G1
Vector A01479 encoding a CAG-repeat targeting dCas13d protein for blocking

| Plasmid | |
|---|---|
| Element | Nucleic Acid Sequences |
| 5' ITR | Cctgcaggcagctgcgcgctcgctcgctcactgaggccgcccgggcgtcgggcgacctttggtcgcccggcctcag |
| | tgagcgagcgagcgcgcagagagggagtggccaactccatcactaggggttcct (SEQ ID NO: 597) |
| Human U6 | Gagggcctatttcccatgattccttcatatttgcatatacgatacaaggctgttagagagataattggaattaatttgactgt |
| promoter | aaacacaaagatattagtacaaaatacgtgacgtagaaagtaataatttcttgggtagtttgcagttttaaaattatgttttaa |
| | aatggactatcatatgcttaccgtaacttgaaagtatttcgatttcttggctttatatatcttgtggaaaggacgaaacacc |
| | (SEQ ID NO: 519) |
| Seq212 direct | Tagccctgcagtaaggcagggttctaagac (SEQ ID NO: 596) |
| repeat (DR) | |
| Spacer (CAG | Ctgctgctgctgctgctgctgctgct (SEQ ID NO: 459) |
| guide 3) | |
| EFS promoter | Taggtcttgaaaggagtgggaattggctccggtgcccgtcagtgggcagagcgcacatcgcccacagtccccgaga |
| | agttggggggaggggtcggcaattgatccggtgcctagagaaggtggcgcggggtaaactgggaaagtgatgtcgt |
| | gtactggctccgcctttttcccgaggggggggagaaccgtatataagtgcagtagtcgccgtgaacgttctttttcgcaa |
| | cgggtttgccgccagaacacagg (SEQ ID NO: 520) |
| Kozak Sequence | GCCGCCACCATG (SEQ ID NO: 529) |
| Dead Seq212 | AAGAAGAAGCACCAGAGCGCCGCCGAGAAGAGGCAAGTGAAGAAGCT |
| | CAAGAATCAAGAGAAGGCCCAGAAGTACGCTAGCGAGCCTTCCCCCCT |
| | CCAGAGCGATACAGCTGGCGTGGAATGCTCCCAGAAAAAGACAGTCGT |
| | CAGCCACATTGCCAGCTCCAAGACACTGGCCAAGGCTATGGGACTCAA |
| | ATCCACACTGGTCATGGGCGACAAGCTGGTCATCACCAGCTTTGCTGCT |
| | AGCAAGGCTGTCGGAGGCGCTGGCTACAAAAGCGCTAACATTGAAAAA |
| | ATCACAGATCTGCAAGGAAGGGTCATTGAGGAGCACGAAAGGATGTTT |
| | AGCGCCGATGTCGGAGAGAAAAATATCGAACTGAGCAAGAATGACTGC |
| | CACACCAACGTCAACAACCCCGTGGTGACCAACATCGGAAAGGATTAC |
| | ATCGGACTGAAATCTAGGCTGGAGCAAGAGTTTTTCGGCAAGACATTC |
| | GAGAATGACAATCTGCATGTGCAGCTGGCCTACAATATCCTCGACATCA |
| | AGAAAATTCTGGGAACCTATGTGAACAATATCATTTATATCTTCTACAA |
| | TCTGAATAGGGCTGGCACCGGCAGAGATGAGAGGATGTATGACGACCT |
| | CATCGGCACACTGTACGCTTACAAACCCATGGAGGCTCAACAGACCTAT |
| | CTGCTCAAAGGCGACAAGGATATGAGGAGGTTTGAGGAGGTGAAACAG |
| | CTGCTGCAAAACACCTCCGCTTACTATGTGTATTACGGCACACTGTTCG |
| | AGAAGGTGAAGGCTAAGAGCAAGAAGGAACAGAGGGCTAAGGAGGCC |
| | GAAATCGACGCTTGTACCGCCCATAACTACGATGTGCTGAGACTGCTGT |
| | CCCTCATGAGGCAGCTGTGCATGCACTCCGTCGCTGGAACAGCCTTTAA |
| | GCTGGCTGAGTCCGCTCTGTTCAACATTGAGGATGTGCTCAGCGCCGAT |
| | CTGAAGGAAATCCTCGATGAAGCCTTCTCCGGCGCCGTGAACAAGCTC |
| | AATGACGGATTCGTGCAGCACTCCGGCAACAATCTGTACGTGCTCCAGC |
| | AGCTGTACCCTAATGAGACCATCGAGAGAATCGCCGAGAAGTACTACA |
| | GACTCACCGTGAGGAAGGAGGATCTGAACATGGGAGTCAACATTAAAA |
| | AGCTGAGGGAGCTGATCGTGGGCCAATACTTTCCCGAGGTCCTCGACA |
| | AAGAATACGACCTCTCCAAGAATGGAGACAGCGTGGTGACATACAGAA |
| | GCAAGATTTATACCGTGATGAATTACATTCTGCTGTATTACCTCGAGGA |
| | CCACGACTCCAGCAGAGAAAGCATGGTCGAAGCTCTGAGACAAAACAG |
| | AGAGGGCGATGAAGGCAAGGAGGAGATCTATAGACAGTTTGCCAAGA |
| | AGGTGTGGAACGGCGTGTCCGGACTGTTTGGCGTGTGTCTGAACCTCTT |
| | CAAGACCGAAAAGAGAAACAAGTTTAGGAGCAAAGTCGCCCTCCCCGA |
| | TGTGTCCGGCGCTGCCTATATGCTCTCCTCCGAGAACATCGACTACTTT |
| | GTCAAGATGCTCTTCTTTGTGTGTAAGTTTCTGGATGGCAAAGAAATCA |
| | ACGAGCTGCTGTGCGCTCTGATCAACAAATTTGATAATATTGCCGATAT |
| | TCTGGATGCTGCCGCTCAATGTGGCTCCTCCGTCTGGTTCGTGGACAGC |
| | TATAGGTTCTTCGAGAGATCTAGGAGGATTAGCGCCCAGATTAGAATCG |
| | TGAAGAACATCGCTTCCAAGGATTTTAAGAAATCCAAGAAGGATTCCG |
| | ATGAGAGCTACCCCGAGCAGCTGTATCTGGATGCTCTGGCTCTGCTCGG |
| | AGACGTCATCTCCAAGTACAAGCAGAATAGAGATGGCAGCGTCGTCAT |
| | CGATGACCAAGGCAATGCCGTGCTGACAGAGCAATACAAGAGGTTTAG |
| | ATATGAATTTTTCGAGGAGATCAAGAGGGACGAAAGCGGCGGCATCAA |
| | GTACAAGAAGTCCGGAAAACCCGAGTACAACCATCAGAGAAGGAATTT |
| | TATTCTGAATAATGTGCTGAAAAGCAAATGGTTTTTCTATGTGGTGAAG |
| | TACAATAGGCCCAGCAGCTGCAGAGAACTGATGAAGAATAAGGAAATT |
| | CTGAGGTTCGTGCTGAGAGACATCCCCGACTCCCAAGTGAGAAGATAC |
| | TTTAAGGCCGTCCAAGGAGAGGAAGCTTACGCTAGCGCCGAAGCTATG |
| | AGGACAAGACTGGTCGACGCTCTGTCCCAATTTAGCGTCACAGCTTGTC |
| | TGGATGAAGTGGGCGGCATGACAGACAAGGAATTCGCCTCCCAGAGGG |
| | CCGTCGATAGCAAAGAAAAACTGAGAGCCATCATCAGACTGTATCTGA |
| | CAGTCGCCTATCTGATTACCAAGAGCATGGTGAAGGTGAATACAAGGT |
| | TTAGCATTGCCTTTAGCGTGCTGGAGAGGGACTACTATCTGCTCATTGA |
| | CGGCAAGAAGAAATCCAGCGACTACACCGGAGAGGATATGCTGGCTCT |
| | GACCAGAAAATTTGTGGGCGAAGATGCTGGACTGTATAGAGAGTGGAA |
| | AGAGAAGAACGCTGAAGCCAAGGACAAATATTTTGACAAGGCCGAAA |
| | GGAAGAAGGTGCTGAGACAGAACGATAAGATGATCAGAAAGATGCAC |
| | TTCACACCCCACTCCCTCAATTACGTCCAAAAGAATCTCGAAAGCGTCC |
| | AGAGCAACGGACTGGCCGCCGTCATCAAGGAATATAGAAATGCCGTCG |
| | CTgcCCTCAATATCATCAATAGACTGGACGAGTACATTGGCTCCGCTAG |
| | GGCTGATAGCTACTACTCTCTGTACTGTTACTGCCTCCAAATGTATCTGA |
| | GCAAGAACTTCAGCGTGGGCTACCTCATCAACGTGCAAAAGCAGCTGG |
| | AGGAGCACCACACCTACATGAAGGATCTCATGTGGCTGCTCAACATCCC |
| | CTTCGCTTACAACCTCGCCAGATACAAAAATCTGTCCAACGAAAAACTC |
| | TTTTACGACGAGGAAGCCGCCGCCGAAAAGGCTGACAAGGCTGAGAAC |
| | GAGAGAGGCGAA (SEQ ID NO: 599) |
| Linker | GGAAGC |
| SV-40 NLS | CCCAAGAAGAAAAGGAAGGTC (SEQ ID NO: 532) |
| Linker | GAGGAC |
| HA Tag | TACCCCTACGATGTGCCCGACTACGCC (SEQ ID NO: 608) |
| WPRE3 | GATAATCAACCTCTGGATTACAAAATTTGTGAAAGATTGACTGGTATTC |
| | TTAACTATGTTGCTCCTTTTACGCTATGTGGATACGCTGCTTTAATGCCT |
| | TTGTATCATGCTATTGCTTCCCGTATGGCTTTCATTTTCTCCTCCTTGTAT |
| | AAATCCTGGTTAGTTCTTGCCACGGCGGAACTCATCGCCGCCTGCCTTG |
| | CCCGCTGCTGGACAGGGGCTCGGCTGTTGGGCACTGACAATTCCGTGG |
| | (SEQ ID NO: 609) |
| SV-40 poly A | AACTTGTTTATTGCAGCTTATAATGGTTACAAATAAAGCAATAGCATCA |
| | CAAATTTCACAAATAAAGCATTTTTTTCACTGCATTCTAGTTGTGGTTTG |
| | TCCAAACTCATCAATGTATCTTA (SEQ ID NO: 533) |
| 3'ITR | Aggaacccctagtgatggagttggccactccctctctgcgcgctcgctcgctcactgaggccgggcgaccaaaggtc |
| | gcccgacgcccgggctttgcccgggcggcctcagtgagcgagcgagcgcgcagctgcctgcagg (SEQ ID |
| | NO: 598) |

[0618] In some embodiments, an AAV vector comprising a nucleic acid encoding a CAG-targeting Cas13d composition comprises from 5′ to 3′: a sequence encoding a 5′ ITR (a first ITR), a sequence encoding an human U6 promoter, a dCas13d seq212 direct repeat, a sequence encoding a CAG guide 3 spacer sequence, a sequence encoding an EFS promoter, a sequence encoding a kozak sequence, a sequence encoding a dCas13d seq212 protein, a sequence encoding a linker sequence, a sequence encoding an SV-40 NLS, a sequence encoding a linker sequence, a sequence encoding an HA tag, a sequence encoding a WPRE, a sequence encoding an SV-40 polyA, and a 3′ ITR (a second ITR). In some embodiments, a nucleic acid encoding the vector is set forth in in SEQ ID NO: 589. In some embodiments, the CAG-targeting Cas13d composition is arranged as depicted in Table H. In some embodiments, vector A01922 is suitable for blocking. In some aspects, vector A01922 is encoded by a nucleic acid sequence comprising SEQ ID NO: 589.

[0619] In some embodiments, the vector set forth in Table H is referred to as A01922.

TABLE H
Vector A01922 encoding a CAG-repeat targeting dCas13d fusion for blocking

| Plasmid | |
|---|---|
| Element | Nucleic Acid Sequences |
| 5' ITR | Cctgcaggcagctgcgcgctcgctcgctcactgaggccgcccgggcgtcgggcgacctttggtcgcccggcctcag |
| | tgagcgagcgagcgcgcagagagggagtggccaactccatcactaggggttcct (SEQ ID NO: 597) |
| Human U6 | Gagggcctatttcccatgattccttcatatttgcatatacgatacaaggctgttagagagataattggaattaatttgactgt |
| promoter | aaacacaaagatattagtacaaaatacgtgacgtagaaagtaataatttcttgggtagtttgcagttttaaaattatgttttaa |
| | aatggactatcatatgcttaccgtaacttgaaagtatttcgatttcttggctttatatatcttgtggaaaggacgaaacacc |
| | (SEQ ID NO: 519) |
| Seq212 direct | Tagccctgcagtaaggcagggttctaagac (SEQ ID NO: 596) |
| repeat (DR) | |
| Spacer (CAG | Ctgctgctgctgctgctgctgctgct (SEQ ID NO: 459) |
| guide 3) | |
| EFS promoter | Taggtcttgaaaggagtgggaattggctccggtgcccgtcagtgggcagagcgcacatcgcccacagtccccgaga |
| | agttggggggaggggtcggcaattgatccggtgcctagagaaggtggcgcggggtaaactgggaaagtgatgtcgt |
| | gtactggctccgcctttttcccgagggtgggggagaaccgtatataagtgcagtagtcgccgtgaacgttctttttcgcaa |
| | cgggtttgccgccagaacacagg (SEQ ID NO: 520) |
| Kozak Sequence | GCCGCCACCATG (SEQ ID NO: 529) |
| Dead Seq212 | AAGAAGAAGCACCAGAGCGCCGCCGAGAAGAGGCAAGTGAAGAAGCT |
| | CAAGAATCAAGAGAAGGCCCAGAAGTACGCTAGCGAGCCTTCCCCCCT |
| | CCAGAGCGATACAGCTGGCGTGGAATGCTCCCAGAAAAAGACAGTCGT |
| | CAGCCACATTGCCAGCTCCAAGACACTGGCCAAGGCTATGGGACTCAA |
| | ATCCACACTGGTCATGGGCGACAAGCTGGTCATCACCAGCTTTGCTGCT |
| | AGCAAGGCTGTCGGAGGCGCTGGCTACAAAAGCGCTAACATTGAAAAA |
| | ATCACAGATCTGCAAGGAAGGGTCATTGAGGAGCACGAAAGGATGTTT |
| | AGCGCCGATGTCGGAGAGAAAAATATCGAACTGAGCAAGAATGACTGC |
| | CACACCAACGTCAACAACCCCGTGGTGACCAACATCGGAAAGGATTAC |
| | ATCGGACTGAAATCTAGGCTGGAGCAAGAGTTTTTCGGCAAGACATTC |
| | GAGAATGACAATCTGCATGTGCAGCTGGCCTACAATATCCTCGACATCA |
| | AGAAAATTCTGGGAACCTATGTGAACAATATCATTTATATCTTCTACAA |
| | TCTGAATAGGGCTGGCACCGGCAGAGATGAGAGGATGTATGACGACCT |
| | CATCGGCACACTGTACGCTTACAAACCCATGGAGGCTCAACAGACCTAT |
| | CTGCTCAAAGGCGACAAGGATATGAGGAGGTTTGAGGAGGTGAAACAG |
| | CTGCTGCAAAACACCTCCGCTTACTATGTGTATTACGGCACACTGTTCG |
| | AGAAGGTGAAGGCTAAGAGCAAGAAGGAACAGAGGGCTAAGGAGGCC |
| | GAAATCGACGCTTGTACCGCCCATAACTACGATGTGCTGAGACTGCTGT |
| | CCCTCATGgcGCAGCTGTGCATGgcCTCCGTCGCTGGAACAGCCTTTAAG |
| | CTGGCTGAGTCCGCTCTGTTCAACATTGAGGATGTGCTCAGCGCCGATC |
| | TGAAGGAAATCCTCGATGAAGCCTTCTCCGGCGCCGTGAACAAGCTCA |
| | ATGACGGATTCGTGCAGCACTCCGGCAACAATCTGTACGTGCTCCAGCA |
| | GCTGTACCCTAATGAGACCATCGAGAGAATCGCCGAGAAGTACTACAG |
| | ACTCACCGTGAGGAAGGAGGATCTGAACATGGGAGTCAACATTAAAAA |
| | GCTGAGGGAGCTGATCGTGGGCCAATACTTTCCCGAGGTCCTCGACAA |
| | AGAATACGACCTCTCCAAGAATGGAGACAGCGTGGTGACATACAGAAG |
| | CAAGATTTATACCGTGATGAATTACATTCTGCTGTATTACCTCGAGGAC |
| | CACGACTCCAGCAGAGAAAGCATGGTCGAAGCTCTGAGACAAAACAGA |
| | GAGGGCGATGAAGGCAAGGAGGAGATCTATAGACAGTTTGCCAAGAA |
| | GGTGTGGAACGGCGTGTCCGGACTGTTTGGCGTGTGTCTGAACCTCTTC |
| | AAGACCGAAAAGAGAAACAAGTTTAGGAGCAAAGTCGCCCTCCCCGAT |
| | GTGTCCGGCGCTGCCTATATGCTCTCCTCCGAGAACATCGACTACTTTG |
| | TCAAGATGCTCTTCTTTGTGTGTAAGTTTCTGGATGGCAAAGAAATCAA |
| | CGAGCTGCTGTGCGCTCTGATCAACAAATTTGATAATATTGCCGATATT |
| | CTGGATGCTGCCGCTCAATGTGGCTCCTCCGTCTGGTTCGTGGACAGCT |
| | ATAGGTTCTTCGAGAGATCTAGGAGGATTAGCGCCCAGATTAGAATCGT |
| | GAAGAACATCGCTTCCAAGGATTTTAAGAAATCCAAGAAGGATTCCGA |
| | TGAGAGCTACCCCGAGCAGCTGTATCTGGATGCTCTGGCTCTGCTCGGA |
| | GACGTCATCTCCAAGTACAAGCAGAATAGAGATGGCAGCGTCGTCATC |
| | GATGACCAAGGCAATGCCGTGCTGACAGAGCAATACAAGAGGTTTAGA |
| | TATGAATTTTTCGAGGAGATCAAGAGGGACGAAAGCGGCGGCATCAAG |
| | TACAAGAAGTCCGGAAAACCCGAGTACAACCATCAGAGAAGGAATTTT |
| | ATTCTGAATAATGTGCTGAAAAGCAAATGGTTTTTCTATGTGGTGAAGT |
| | ACAATAGGCCCAGCAGCTGCAGAGAACTGATGAAGAATAAGGAAATTC |
| | TGAGGTTCGTGCTGAGAGACATCCCCGACTCCCAAGTGAGAAGATACTT |
| | TAAGGCCGTCCAAGGAGAGGAAGCTTACGCTAGCGCCGAAGCTATGAG |
| | GACAAGACTGGTCGACGCTCTGTCCCAATTTAGCGTCACAGCTTGTCTG |
| | GATGAAGTGGGCGGCATGACAGACAAGGAATTCGCCTCCCAGAGGGCC |
| | GTCGATAGCAAAGAAAAACTGAGAGCCATCATCAGACTGTATCTGACA |
| | GTCGCCTATCTGATTACCAAGAGCATGGTGAAGGTGAATACAAGGTTTA |
| | GCATTGCCTTTAGCGTGCTGGAGAGGGACTACTATCTGCTCATTGACGG |
| | CAAGAAGAAATCCAGCGACTACACCGGAGAGGATATGCTGGCTCTGAC |
| | CAGAAAATTTGTGGGCGAAGATGCTGGACTGTATAGAGAGTGGAAAGA |
| | GAAGAACGCTGAAGCCAAGGACAAATATTTTGACAAGGCCGAAAGGA |
| | AGAAGGTGCTGAGACAGAACGATAAGATGATCAGAAAGATGCACTTCA |
| | CACCCCACTCCCTCAATTACGTCCAAAAGAATCTCGAAAGCGTCCAGAG |
| | CAACGGACTGGCCGCCGTCATCAAGGAATATgcAAATGCCGTCGCTgcCC |
| | TCAATATCATCAATAGACTGGACGAGTACATTGGCTCCGCTAGGGCTGA |
| | TAGCTACTACTCTCTGTACTGTTACTGCCTCCAAATGTATCTGAGCAAG |
| | AACTTCAGCGTGGGCTACCTCATCAACGTGCAAAAGCAGCTGGAGGAG |
| | CACCACACCTACATGAAGGATCTCATGTGGCTGCTCAACATCCCCTTCG |
| | CTTACAACCTCGCCAGATACAAAAATCTGTCCAACGAAAAACTCTTTTA |
| | CGACGAGGAAGCCGCCGCCGAAAAGGCTGACAAGGCTGAGAACGAGA |
| | GAGGCGAA (SEQ ID NO: 600) |
| Linker | GGAAGC |
| SV-40 NLS | CCCAAGAAGAAAAGGAAGGTC (SEQ ID NO: 532) |
| Linker | GAGGAC |
| HA Tag | TACCCCTACGATGTGCCCGACTACGCC (SEQ ID NO: 608) |
| WPRE3 | GATAATCAACCTCTGGATTACAAAATTTGTGAAAGATTGACTGGTATTC |
| | TTAACTATGTTGCTCCTTTTACGCTATGTGGATACGCTGCTTTAATGCCT |
| | TTGTATCATGCTATTGCTTCCCGTATGGCTTTCATTTTCTCCTCCTTGTAT |
| | AAATCCTGGTTAGTTCTTGCCACGGCGGAACTCATCGCCGCCTGCCTTG |
| | CCCGCTGCTGGACAGGGGCTCGGCTGTTGGGCACTGACAATTCCGTGG |
| | (SEQ ID NO: 609) |
| SV-40 poly A | AACTTGTTTATTGCAGCTTATAATGGTTACAAATAAAGCAATAGCATCA |
| | CAAATTTCACAAATAAAGCATTTTTTTCACTGCATTCTAGTTGTGGTTTG |
| | TCCAAACTCATCAATGTATCTTA (SEQ ID NO: 533) |
| 3'ITR | Aggaacccctagtgatggagttggccactccctctctgcgcgctcgctcgctcactgaggccgggcgaccaaaggtc |
| | gcccgacgcccgggctttgcccgggcggcctcagtgagcgagcgagcgcgcagctgcctgcagg (SEQ ID |
| | NO: 598) |

[0620] In some embodiments, an AAV vector comprising a nucleic acid encoding a CAG-targeting Cas13d composition comprises from 5′ to 3′: a sequence encoding a 5′ ITR (a first ITR), a sequence encoding an human U6 promoter, a dCas13d seq212 direct repeat, a sequence encoding a CAG guide 3 spacer sequence, a sequence encoding an EFS promoter, a sequence encoding a kozak sequence, a sequence encoding a dCas13d seq212 protein, a sequence encoding a linker sequence, a sequence encoding an SV-40 NLS, a sequence encoding a linker sequence, a sequence encoding an HA tag, a sequence encoding a WPRE, a sequence encoding an SV-40 polyA, and a 3′ ITR (a second ITR). In some embodiments, the CAG-targeting Cas13d composition is arranged as depicted in Table I.

TABLE I
Vector encoding a CAG-repeat targeting dCas 13d fusion

| Plasmid | |
|---|---|
| Element | Nucleic Acid Sequences |
| 5' ITR | Cctgcaggcagctgcgcgctcgctcgctcactgaggccgcccgggcgtcgggcgacctttggtcgcccggcctcag |
| | tgagcgagcgagcgcgcagagagggagtggccaactccatcactaggggttcct (SEQ ID NO: 597) |
| Human U6 | Gagggcctatttcccatgattccttcatatttgcatatacgatacaaggctgttagagagataattggaattaatttgactgt |
| promoter | aaacacaaagatattagtacaaaatacgtgacgtagaaagtaataatttcttgggtagtttgcagttttaaaattatgttttaa |
| | aatggactatcatatgcttaccgtaacttgaaagtatttcgatttcttggctttatatatcttgtggaaaggacgaaacacc |
| | (SEQ ID NO: 519) |
| Seq212 direct | Tagccctgcagtaaggcagggttctaagac (SEQ ID NO: 596) |
| repeat (DR) | |
| Spacer (CAG | Ctgctgctgctgctgctgctgctgct (SEQ ID NO: 459) |
| guide 3) | |
| EFS promoter | Taggtcttgaaaggagtgggaattggctccggtgcccgtcagtgggcagagcgcacatcgcccacagtccccgaga |
| | agttggggggaggggtcggcaattgatccggtgcctagagaaggtggcgcggggtaaactgggaaagtgatgtcgt |
| | gtactggctccgcctttttcccgaggggggggagaaccgtatataagtgcagtagtcgccgtgaacgttctttttcgcaa |
| | cgggtttgccgccagaacacagg (SEQ ID NO: 520) |
| Kozak Sequence | GCCGCCACCATG (SEQ ID NO: 529) |
| Dead Seq212 | AAGAAGAAGCACCAGAGCGCCGCCGAGAAGAGGCAAGTGAAGAAGCT |
| | CAAGAATCAAGAGAAGGCCCAGAAGTACGCTAGCGAGCCTTCCCCCCT |
| | CCAGAGCGATACAGCTGGCGTGGAATGCTCCCAGAAAAAGACAGTCGT |
| | CAGCCACATTGCCAGCTCCAAGACACTGGCCAAGGCTATGGGACTCAA |
| | ATCCACACTGGTCATGGGCGACAAGCTGGTCATCACCAGCTTTGCTGCT |
| | AGCAAGGCTGTCGGAGGCGCTGGCTACAAAAGCGCTAACATTGAAAAA |
| | ATCACAGATCTGCAAGGAAGGGTCATTGAGGAGCACGAAAGGATGTTT |
| | AGCGCCGATGTCGGAGAGAAAAATATCGAACTGAGCAAGAATGACTGC |
| | CACACCAACGTCAACAACCCCGTGGTGACCAACATCGGAAAGGATTAC |
| | ATCGGACTGAAATCTAGGCTGGAGCAAGAGTTTTTCGGCAAGACATTC |
| | GAGAATGACAATCTGCATGTGCAGCTGGCCTACAATATCCTCGACATCA |
| | AGAAAATTCTGGGAACCTATGTGAACAATATCATTTATATCTTCTACAA |
| | TCTGAATAGGGCTGGCACCGGCAGAGATGAGAGGATGTATGACGACCT |
| | CATCGGCACACTGTACGCTTACAAACCCATGGAGGCTCAACAGACCTAT |
| | CTGCTCAAAGGCGACAAGGATATGAGGAGGTTTGAGGAGGTGAAACAG |
| | CTGCTGCAAAACACCTCCGCTTACTATGTGTATTACGGCACACTGTTCG |
| | AGAAGGTGAAGGCTAAGAGCAAGAAGGAACAGAGGGCTAAGGAGGCC |
| | GAAATCGACGCTTGTACCGCCCATAACTACGATGTGCTGAGACTGCTGT |
| | CCCTCATGAGGCAGCTGTGCATGCACTCCGTCGCTGGAACAGCCTTTAA |
| | GCTGGCTGAGTCCGCTCTGTTCAACATTGAGGATGTGCTCAGCGCCGAT |
| | CTGAAGGAAATCCTCGATGAAGCCTTCTCCGGCGCCGTGAACAAGCTC |
| | AATGACGGATTCGTGCAGCACTCCGGCAACAATCTGTACGTGCTCCAGC |
| | AGCTGTACCCTAATGAGACCATCGAGAGAATCGCCGAGAAGTACTACA |
| | GACTCACCGTGAGGAAGGAGGATCTGAACATGGGAGTCAACATTAAAA |
| | AGCTGAGGGAGCTGATCGTGGGCCAATACTTTCCCGAGGTCCTCGACA |
| | AAGAATACGACCTCTCCAAGAATGGAGACAGCGTGGTGACATACAGAA |
| | GCAAGATTTATACCGTGATGAATTACATTCTGCTGTATTACCTCGAGGA |
| | CCACGACTCCAGCAGAGAAAGCATGGTCGAAGCTCTGAGACAAAACAG |
| | AGAGGGCGATGAAGGCAAGGAGGAGATCTATAGACAGTTTGCCAAGA |
| | AGGTGTGGAACGGCGTGTCCGGACTGTTTGGCGTGTGTCTGAACCTCTT |
| | CAAGACCGAAAAGAGAAACAAGTTTAGGAGCAAAGTCGCCCTCCCCGA |
| | TGTGTCCGGCGCTGCCTATATGCTCTCCTCCGAGAACATCGACTACTTT |
| | GTCAAGATGCTCTTCTTTGTGTGTAAGTTTCTGGATGGCAAAGAAATCA |
| | ACGAGCTGCTGTGCGCTCTGATCAACAAATTTGATAATATTGCCGATAT |
| | TCTGGATGCTGCCGCTCAATGTGGCTCCTCCGTCTGGTTCGTGGACAGC |
| | TATAGGTTCTTCGAGAGATCTAGGAGGATTAGCGCCCAGATTAGAATCG |
| | TGAAGAACATCGCTTCCAAGGATTTTAAGAAATCCAAGAAGGATTCCG |
| | ATGAGAGCTACCCCGAGCAGCTGTATCTGGATGCTCTGGCTCTGCTCGG |
| | AGACGTCATCTCCAAGTACAAGCAGAATAGAGATGGCAGCGTCGTCAT |
| | CGATGACCAAGGCAATGCCGTGCTGACAGAGCAATACAAGAGGTTTAG |
| | ATATGAATTTTTCGAGGAGATCAAGAGGGACGAAAGCGGCGGCATCAA |
| | GTACAAGAAGTCCGGAAAACCCGAGTACAACCATCAGAGAAGGAATTT |
| | TATTCTGAATAATGTGCTGAAAAGCAAATGGTTTTTCTATGTGGTGAAG |
| | TACAATAGGCCCAGCAGCTGCAGAGAACTGATGAAGAATAAGGAAATT |
| | CTGAGGTTCGTGCTGAGAGACATCCCCGACTCCCAAGTGAGAAGATAC |
| | TTTAAGGCCGTCCAAGGAGAGGAAGCTTACGCTAGCGCCGAAGCTATG |
| | AGGACAAGACTGGTCGACGCTCTGTCCCAATTTAGCGTCACAGCTTGTC |
| | TGGATGAAGTGGGCGGCATGACAGACAAGGAATTCGCCTCCCAGAGGG |
| | CCGTCGATAGCAAAGAAAAACTGAGAGCCATCATCAGACTGTATCTGA |
| | CAGTCGCCTATCTGATTACCAAGAGCATGGTGAAGGTGAATACAAGGT |
| | TTAGCATTGCCTTTAGCGTGCTGGAGAGGGACTACTATCTGCTCATTGA |
| | CGGCAAGAAGAAATCCAGCGACTACACCGGAGAGGATATGCTGGCTCT |
| | GACCAGAAAATTTGTGGGCGAAGATGCTGGACTGTATAGAGAGTGGAA |
| | AGAGAAGAACGCTGAAGCCAAGGACAAATATTTTGACAAGGCCGAAA |
| | GGAAGAAGGTGCTGAGACAGAACGATAAGATGATCAGAAAGATGCAC |
| | TTCACACCCCACTCCCTCAATTACGTCCAAAAGAATCTCGAAAGCGTCC |
| | AGAGCAACGGACTGGCCGCCGTCATCAAGGAATATAGAAATGCCGTCG |
| | CTgcCCTCAATATCATCAATAGACTGGACGAGTACATTGGCTCCGCTAG |
| | GGCTGATAGCTACTACTCTCTGTACTGTTACTGCCTCCAAATGTATCTGA |
| | GCAAGAACTTCAGCGTGGGCTACCTCATCAACGTGCAAAAGCAGCTGG |
| | AGGAGCACCACACCTACATGAAGGATCTCATGTGGCTGCTCAACATCCC |
| | CTTCGCTTACAACCTCGCCAGATACAAAAATCTGTCCAACGAAAAACTC |
| | TTTTACGACGAGGAAGCCGCCGCCGAAAAGGCTGACAAGGCTGAGAAC |
| | GAGAGAGGCGAA (SEQ ID NO: 601) |
| Linker | GGAAGC |
| SV-40 NLS | CCCAAGAAGAAAAGGAAGGTC (SEQ ID NO: 532) |
| Linker | GAGGAC |
| HA Tag | TACCCCTACGATGTGCCCGACTACGCC (SEQ ID NO: 608) |
| WPRE3 | GATAATCAACCTCTGGATTACAAAATTTGTGAAAGATTGACTGGTATTC |
| | TTAACTATGTTGCTCCTTTTACGCTATGTGGATACGCTGCTTTAATGCCT |
| | TTGTATCATGCTATTGCTTCCCGTATGGCTTTCATTTTCTCCTCCTTGTAT |
| | AAATCCTGGTTAGTTCTTGCCACGGCGGAACTCATCGCCGCCTGCCTTG |
| | CCCGCTGCTGGACAGGGGCTCGGCTGTTGGGCACTGACAATTCCGTGG |
| | (SEQ ID NO: 609) |
| SV-40 poly A | AACTTGTTTATTGCAGCTTATAATGGTTACAAATAAAGCAATAGCATCA |
| | CAAATTTCACAAATAAAGCATTTTTTTCACTGCATTCTAGTTGTGGTTTG |
| | TCCAAACTCATCAATGTATCTTA (SEQ ID NO: 533) |
| 3'ITR | Aggaacccctagtgatggagttggccactccctctctgcgcgctcgctcgctcactgaggccgggcgaccaaaggtc |
| | gcccgacgcccgggctttgcccgggggcctcagtgagcgagcgagcgcgcagctgcctgcagg (SEQ ID |
| | NO: 598) |

[0621] In some embodiments, an AAV vector comprising a nucleic acid encoding a CAG-targeting Cas13d composition comprises from 5′ to 3′: a sequence encoding a 5′ ITR (a first ITR), a sequence encoding an human U6 promoter, a dCas13d seq212 direct repeat, a sequence encoding a CAG guide 3 spacer sequence, a sequence encoding an EFS promoter, a sequence encoding a kozak sequence, a sequence encoding a dCas13d seq212 protein, a sequence encoding a linker sequence, a sequence encoding an SV-40 NLS, a sequence encoding a linker sequence, a sequence encoding an HA tag, a sequence encoding a WPRE, a sequence encoding an SV-40 polyA, and a 3′ ITR (a second ITR). In some embodiments, the CAG-targeting Cas13d composition is arranged as depicted in Table J.

TABLE J
Vector encoding a CAG-repeat targeting dCas13d fusion

| Plasmid | |
|---|---|
| Element | Nucleic Acid Sequences |
| 5′ ITR | Cctgcaggcagctgcgcgctcgctcgctcactgaggccgcccgggcgtcgggcgacctttggtcgcccggcctcag |
| | tgagcgagcgagcgcgcagagagggagtggccaactccatcactaggggttcct (SEQ ID NO: 597) |
| Human U6 | Gagggcctatttcccatgattccttcatatttgcatatacgatacaaggctgttagagagataattggaattaatttgactgt |
| promoter | aaacacaaagatattagtacaaaatacgtgacgtagaaagtaataatttcttgggtagtttgcagttttaaaattatgttttaa |
| | aatggactatcatatgcttaccgtaacttgaaagtatttcgatttcttggctttatatatcttgtggaaaggacgaaacacc |
| | (SEQ ID NO: 519) |
| Seq212 direct | Tagccctgcagtaaggcagggttctaagac (SEQ ID NO: 596) |
| repeat (DR) | |
| Spacer (CAG | Ctgctgctgctgctgctgctgctgct (SEQ ID NO: 459) |
| guide 3) | |
| EFS promoter | Taggtcttgaaaggagtgggaattggctccggtgcccgtcagtgggcagagcgcacatcgcccacagtccccgaga |
| | agttggggggaggggtcggcaattgatccggtgcctagagaaggtggcgcggggtaaactgggaaagtgatgtcgt |
| | gtactggctccgcctttttcccgaggggggggagaaccgtatataagtgcagtagtcgccgtgaacgttctttttcgcaa |
| | cgggtttgccgccagaacacagg (SEQ ID NO: 520) |
| Kozak | GCCGCCACCATG (SEQ ID NO: 529) |
| Sequence | |
| Dead Seq212 | AAGAAGAAGCACCAGAGCGCCGCCGAGAAGAGGCAAGTGAAGAAGCT |
| | CAAGAATCAAGAGAAGGCCCAGAAGTACGCTAGCGAGCCTTCCCCCCT |
| | CCAGAGCGATACAGCTGGCGTGGAATGCTCCCAGAAAAAGACAGTCGT |
| | CAGCCACATTGCCAGCTCCAAGACACTGGCCAAGGCTATGGGACTCAA |
| | ATCCACACTGGTCATGGGCGACAAGCTGGTCATCACCAGCTTTGCTGCT |
| | AGCAAGGCTGTCGGAGGCGCTGGCTACAAAAGCGCTAACATTGAAAAA |
| | ATCACAGATCTGCAAGGAAGGGTCATTGAGGAGCACGAAAGGATGTTT |
| | AGCGCCGATGTCGGAGAGAAAAATATCGAACTGAGCAAGAATGACTGC |
| | CACACCAACGTCAACAACCCCGTGGTGACCAACATCGGAAAGGATTAC |
| | ATCGGACTGAAATCTAGGCTGGAGCAAGAGTTTTTCGGCAAGACATTC |
| | GAGAATGACAATCTGCATGTGCAGCTGGCCTACAATATCCTCGACATCA |
| | AGAAAATTCTGGGAACCTATGTGAACAATATCATTTATATCTTCTACAA |
| | TCTGAATAGGGCTGGCACCGGCAGAGATGAGAGGATGTATGACGACCT |
| | CATCGGCACACTGTACGCTTACAAACCCATGGAGGCTCAACAGACCTAT |
| | CTGCTCAAAGGCGACAAGGATATGAGGAGGTTTGAGGAGGTGAAACAG |
| | CTGCTGCAAAACACCTCCGCTTACTATGTGTATTACGGCACACTGTTCG |
| | AGAAGGTGAAGGCTAAGAGCAAGAAGGAACAGAGGGCTAAGGAGGCC |
| | GAAATCGACGCTTGTACCGCCCATAACTACGATGTGCTGAGACTGCTGT |
| | CCCTCATGagGCAGCTGTGCATGgcCTCCGTCGCTGGAACAGCCTTTAAG |
| | CTGGCTGAGTCCGCTCTGTTCAACATTGAGGATGTGCTCAGCGCCGATC |
| | TGAAGGAAATCCTCGATGAAGCCTTCTCCGGCGCCGTGAACAAGCTCA |
| | ATGACGGATTCGTGCAGCACTCCGGCAACAATCTGTACGTGCTCCAGCA |
| | GCTGTACCCTAATGAGACCATCGAGAGAATCGCCGAGAAGTACTACAG |
| | ACTCACCGTGAGGAAGGAGGATCTGAACATGGGAGTCAACATTAAAAA |
| | GCTGAGGGAGCTGATCGTGGGCCAATACTTTCCCGAGGTCCTCGACAA |
| | AGAATACGACCTCTCCAAGAATGGAGACAGCGTGGTGACATACAGAAG |
| | CAAGATTTATACCGTGATGAATTACATTCTGCTGTATTACCTCGAGGAC |
| | CACGACTCCAGCAGAGAAAGCATGGTCGAAGCTCTGAGACAAAACAGA |
| | GAGGGCGATGAAGGCAAGGAGGAGATCTATAGACAGTTTGCCAAGAA |
| | GGTGTGGAACGGCGTGTCCGGACTGTTTGGCGTGTGTCTGAACCTCTTC |
| | AAGACCGAAAAGAGAAACAAGTTTAGGAGCAAAGTCGCCCTCCCCGAT |
| | GTGTCCGGCGCTGCCTATATGCTCTCCTCCGAGAACATCGACTACTTTG |
| | TCAAGATGCTCTTCTTTGTGTGTAAGTTTCTGGATGGCAAAGAAATCAA |
| | CGAGCTGCTGTGCGCTCTGATCAACAAATTTGATAATATTGCCGATATT |
| | CTGGATGCTGCCGCTCAATGTGGCTCCTCCGTCTGGTTCGTGGACAGCT |
| | ATAGGTTCTTCGAGAGATCTAGGAGGATTAGCGCCCAGATTAGAATCGT |
| | GAAGAACATCGCTTCCAAGGATTTTAAGAAATCCAAGAAGGATTCCGA |
| | TGAGAGCTACCCCGAGCAGCTGTATCTGGATGCTCTGGCTCTGCTCGGA |
| | GACGTCATCTCCAAGTACAAGCAGAATAGAGATGGCAGCGTCGTCATC |
| | GATGACCAAGGCAATGCCGTGCTGACAGAGCAATACAAGAGGTTTAGA |
| | TATGAATTTTTCGAGGAGATCAAGAGGGACGAAAGCGGCGGCATCAAG |
| | TACAAGAAGTCCGGAAAACCCGAGTACAACCATCAGAGAAGGAATTTT |
| | ATTCTGAATAATGTGCTGAAAAGCAAATGGTTTTTCTATGTGGTGAAGT |
| | ACAATAGGCCCAGCAGCTGCAGAGAACTGATGAAGAATAAGGAAATTC |
| | TGAGGTTCGTGCTGAGAGACATCCCCGACTCCCAAGTGAGAAGATACTT |
| | TAAGGCCGTCCAAGGAGAGGAAGCTTACGCTAGCGCCGAAGCTATGAG |
| | GACAAGACTGGTCGACGCTCTGTCCCAATTTAGCGTCACAGCTTGTCTG |
| | GATGAAGTGGGCGGCATGACAGACAAGGAATTCGCCTCCCAGAGGGCC |
| | GTCGATAGCAAAGAAAAACTGAGAGCCATCATCAGACTGTATCTGACA |
| | GTCGCCTATCTGATTACCAAGAGCATGGTGAAGGTGAATACAAGGTTTA |
| | GCATTGCCTTTAGCGTGCTGGAGAGGGACTACTATCTGCTCATTGACGG |
| | CAAGAAGAAATCCAGCGACTACACCGGAGAGGATATGCTGGCTCTGAC |
| | CAGAAAATTTGTGGGCGAAGATGCTGGACTGTATAGAGAGTGGAAAGA |
| | GAAGAACGCTGAAGCCAAGGACAAATATTTTGACAAGGCCGAAAGGA |
| | AGAAGGTGCTGAGACAGAACGATAAGATGATCAGAAAGATGCACTTCA |
| | CACCCCACTCCCTCAATTACGTCCAAAAGAATCTCGAAAGCGTCCAGAG |
| | CAACGGACTGGCCGCCGTCATCAAGGAATATagAAATGCCGTCGCTcaCC |
| | TCAATATCATCAATAGACTGGACGAGTACATTGGCTCCGCTAGGGCTGA |
| | TAGCTACTACTCTCTGTACTGTTACTGCCTCCAAATGTATCTGAGCAAG |
| | AACTTCAGCGTGGGCTACCTCATCAACGTGCAAAAGCAGCTGGAGGAG |
| | CACCACACCTACATGAAGGATCTCATGTGGCTGCTCAACATCCCCTTCG |
| | CTTACAACCTCGCCAGATACAAAAATCTGTCCAACGAAAAACTCTTTTA |
| | CGACGAGGAAGCCGCCGCCGAAAAGGCTGACAAGGCTGAGAACGAGA |
| | GAGGCGAA (SEQ ID NO: 602) |
| Linker | GGAAGC |
| SV-40 NLS | CCCAAGAAGAAAAGGAAGGTC (SEQ ID NO: 532) |
| Linker | GAGGAC |
| HA Tag | TACCCCTACGATGTGCCCGACTACGCC (SEQ ID NO: 608) |
| WPRE3 | GATAATCAACCTCTGGATTACAAAATTTGTGAAAGATTGACTGGTATTC |
| | TTAACTATGTTGCTCCTTTTACGCTATGTGGATACGCTGCTTTAATGCCT |
| | TTGTATCATGCTATTGCTTCCCGTATGGCTTTCATTTTCTCCTCCTTGTAT |
| | AAATCCTGGTTAGTTCTTGCCACGGCGGAACTCATCGCCGCCTGCCTTG |
| | CCCGCTGCTGGACAGGGGCTCGGCTGTTGGGCACTGACAATTCCGTGG |
| | (SEQ ID NO: 609) |
| SV-40 poly A | AACTTGTTTATTGCAGCTTATAATGGTTACAAATAAAGCAATAGCATCA |
| | CAAATTTCACAAATAAAGCATTTTTTTCACTGCATTCTAGTTGTGGTTTG |
| | TCCAAACTCATCAATGTATCTTA (SEQ ID NO: 533) |
| 3′ITR | Aggaacccctagtgatggagttggccactccctctctgcgcgctcgctcgctcactgaggccggggaccaaaggtc |
| | gcccgacgcccgggctttgcccgggcggcctcagtgagcgagcgagcgcgcagctgcctgcagg (SEQ ID |
| | NO: 598) |

[0622] In some embodiments, an AAV vector comprising a nucleic acid encoding a CAG-targeting Cas13d composition comprises from 5′ to 3′: a sequence encoding a 5′ ITR (a first ITR), a sequence encoding an human U6 promoter, a dCas13d seq212 direct repeat, a sequence encoding a CAG guide 3 spacer sequence, a sequence encoding an EFS promoter, a sequence encoding a kozak sequence, a sequence encoding a dCas13d seq212 protein, a sequence encoding a linker sequence, a sequence encoding an SV-40 NLS, a sequence encoding a linker sequence, a sequence encoding an HA tag, a sequence encoding a WPRE, a sequence encoding an SV-40 polyA, and a 3′ ITR (a second ITR). In some embodiments, the CAG-targeting Cas13d composition is arranged as depicted in Table K.

TABLE K
Vector encoding a CAG-repeat targeting dCas13d fusion

| Plasmid | |
|---|---|
| Element | Nucleic Acid Sequences |
| 5′ ITR | Cctgcaggcagctgcgcgctcgctcgctcactgaggccgcccgggcgtcgggcgacctttggtcgcccggcctcag |
| | tgagcgagcgagcgcgcagagagggagtggccaactccatcactaggggttcct (SEQ ID NO: 597) |
| Human U6 | Gagggcctatttcccatgattccttcatatttgcatatacgatacaaggctgttagagagataattggaattaatttgactgt |
| promoter | aaacacaaagatattagtacaaaatacgtgacgtagaaagtaataatttcttgggtagtttgcagttttaaaattatgttttaa |
| | aatggactatcatatgcttaccgtaacttgaaagtatttcgatttcttggctttatatatcttgtggaaaggacgaaacacc |
| | (SEQ ID NO: 519) |
| Seq212 direct | Tagccctgcagtaaggcagggttctaagac (SEQ ID NO: 596) |
| repeat (DR) | |
| Spacer (CAG | Ctgctgctgctgctgctgctgctgct (SEQ ID NO: 459) |
| guide 3) | |
| EFS promoter | Taggtcttgaaaggagtgggaattggctccggtgcccgtcagtgggcagagcgcacatcgcccacagtccccgaga |
| | agttggggggaggggtcggcaattgatccggtgcctagagaaggtggcgcggggtaaactgggaaagtgatgtcgt |
| | gtactggctccgcctttttcccgaggggggggagaaccgtatataagtgcagtagtcgccgtgaacgttctttttcgcaa |
| | cgggtttgccgccagaacacagg (SEQ ID NO: 520) |
| Kozak Sequence | GCCGCCACCATG (SEQ ID NO: 529) |
| Dead Seq212 | AAGAAGAAGCACCAGAGCGCCGCCGAGAAGAGGCAAGTGAAGAAGCT |
| | CAAGAATCAAGAGAAGGCCCAGAAGTACGCTAGCGAGCCTTCCCCCCT |
| | CCAGAGCGATACAGCTGGCGTGGAATGCTCCCAGAAAAAGACAGTCGT |
| | CAGCCACATTGCCAGCTCCAAGACACTGGCCAAGGCTATGGGACTCAA |
| | ATCCACACTGGTCATGGGCGACAAGCTGGTCATCACCAGCTTTGCTGCT |
| | AGCAAGGCTGTCGGAGGCGCTGGCTACAAAAGCGCTAACATTGAAAAA |
| | ATCACAGATCTGCAAGGAAGGGTCATTGAGGAGCACGAAAGGATGTTT |
| | AGCGCCGATGTCGGAGAGAAAAATATCGAACTGAGCAAGAATGACTGC |
| | CACACCAACGTCAACAACCCCGTGGTGACCAACATCGGAAAGGATTAC |
| | ATCGGACTGAAATCTAGGCTGGAGCAAGAGTTTTTCGGCAAGACATTC |
| | GAGAATGACAATCTGCATGTGCAGCTGGCCTACAATATCCTCGACATCA |
| | AGAAAATTCTGGGAACCTATGTGAACAATATCATTTATATCTTCTACAA |
| | TCTGAATAGGGCTGGCACCGGCAGAGATGAGAGGATGTATGACGACCT |
| | CATCGGCACACTGTACGCTTACAAACCCATGGAGGCTCAACAGACCTAT |
| | CTGCTCAAAGGCGACAAGGATATGAGGAGGTTTGAGGAGGTGAAACAG |
| | CTGCTGCAAAACACCTCCGCTTACTATGTGTATTACGGCACACTGTTCG |
| | AGAAGGTGAAGGCTAAGAGCAAGAAGGAACAGAGGGCTAAGGAGGCC |
| | GAAATCGACGCTTGTACCGCCCATAACTACGATGTGCTGAGACTGCTGT |
| | CCCTCATGgcGCAGCTGTGCATGcaCTCCGTCGCTGGAACAGCCTTTAAG |
| | CTGGCTGAGTCCGCTCTGTTCAACATTGAGGATGTGCTCAGCGCCGATC |
| | TGAAGGAAATCCTCGATGAAGCCTTCTCCGGCGCCGTGAACAAGCTCA |
| | ATGACGGATTCGTGCAGCACTCCGGCAACAATCTGTACGTGCTCCAGCA |
| | GCTGTACCCTAATGAGACCATCGAGAGAATCGCCGAGAAGTACTACAG |
| | ACTCACCGTGAGGAAGGAGGATCTGAACATGGGAGTCAACATTAAAAA |
| | GCTGAGGGAGCTGATCGTGGGCCAATACTTTCCCGAGGTCCTCGACAA |
| | AGAATACGACCTCTCCAAGAATGGAGACAGCGTGGTGACATACAGAAG |
| | CAAGATTTATACCGTGATGAATTACATTCTGCTGTATTACCTCGAGGAC |
| | CACGACTCCAGCAGAGAAAGCATGGTCGAAGCTCTGAGACAAAACAGA |
| | GAGGGCGATGAAGGCAAGGAGGAGATCTATAGACAGTTTGCCAAGAA |
| | GGTGTGGAACGGCGTGTCCGGACTGTTTGGCGTGTGTCTGAACCTCTTC |
| | AAGACCGAAAAGAGAAACAAGTTTAGGAGCAAAGTCGCCCTCCCCGAT |
| | GTGTCCGGCGCTGCCTATATGCTCTCCTCCGAGAACATCGACTACTTTG |
| | TCAAGATGCTCTTCTTTGTGTGTAAGTTTCTGGATGGCAAAGAAATCAA |
| | CGAGCTGCTGTGCGCTCTGATCAACAAATTTGATAATATTGCCGATATT |
| | CTGGATGCTGCCGCTCAATGTGGCTCCTCCGTCTGGTTCGTGGACAGCT |
| | ATAGGTTCTTCGAGAGATCTAGGAGGATTAGCGCCCAGATTAGAATCGT |
| | GAAGAACATCGCTTCCAAGGATTTTAAGAAATCCAAGAAGGATTCCGA |
| | TGAGAGCTACCCCGAGCAGCTGTATCTGGATGCTCTGGCTCTGCTCGGA |
| | GACGTCATCTCCAAGTACAAGCAGAATAGAGATGGCAGCGTCGTCATC |
| | GATGACCAAGGCAATGCCGTGCTGACAGAGCAATACAAGAGGTTTAGA |
| | TATGAATTTTTCGAGGAGATCAAGAGGGACGAAAGCGGCGGCATCAAG |
| | TACAAGAAGTCCGGAAAACCCGAGTACAACCATCAGAGAAGGAATTTT |
| | ATTCTGAATAATGTGCTGAAAAGCAAATGGTTTTTCTATGTGGTGAAGT |
| | ACAATAGGCCCAGCAGCTGCAGAGAACTGATGAAGAATAAGGAAATTC |
| | TGAGGTTCGTGCTGAGAGACATCCCCGACTCCCAAGTGAGAAGATACTT |
| | TAAGGCCGTCCAAGGAGAGGAAGCTTACGCTAGCGCCGAAGCTATGAG |
| | GACAAGACTGGTCGACGCTCTGTCCCAATTTAGCGTCACAGCTTGTCTG |
| | GATGAAGTGGGCGGCATGACAGACAAGGAATTCGCCTCCCAGAGGGCC |
| | GTCGATAGCAAAGAAAAACTGAGAGCCATCATCAGACTGTATCTGACA |
| | GTCGCCTATCTGATTACCAAGAGCATGGTGAAGGTGAATACAAGGTTTA |
| | GCATTGCCTTTAGCGTGCTGGAGAGGGACTACTATCTGCTCATTGACGG |
| | CAAGAAGAAATCCAGCGACTACACCGGAGAGGATATGCTGGCTCTGAC |
| | CAGAAAATTTGTGGGCGAAGATGCTGGACTGTATAGAGAGTGGAAAGA |
| | GAAGAACGCTGAAGCCAAGGACAAATATTTTGACAAGGCCGAAAGGA |
| | AGAAGGTGCTGAGACAGAACGATAAGATGATCAGAAAGATGCACTTCA |
| | CACCCCACTCCCTCAATTACGTCCAAAAGAATCTCGAAAGCGTCCAGAG |
| | CAACGGACTGGCCGCCGTCATCAAGGAATATagAAATGCCGTCGCTcaCC |
| | TCAATATCATCAATAGACTGGACGAGTACATTGGCTCCGCTAGGGCTGA |
| | TAGCTACTACTCTCTGTACTGTTACTGCCTCCAAATGTATCTGAGCAAG |
| | AACTTCAGCGTGGGCTACCTCATCAACGTGCAAAAGCAGCTGGAGGAG |
| | CACCACACCTACATGAAGGATCTCATGTGGCTGCTCAACATCCCCTTCG |
| | CTTACAACCTCGCCAGATACAAAAATCTGTCCAACGAAAAACTCTTTTA |
| | CGACGAGGAAGCCGCCGCCGAAAAGGCTGACAAGGCTGAGAACGAGA |
| | GAGGCGAA (SEQ ID NO: 603) |
| Linker | GGAAGC |
| SV-40 NLS | CCCAAGAAGAAAAGGAAGGTC (SEQ ID NO: 532) |
| Linker | GAGGAC |
| HA Tag | TACCCCTACGATGTGCCCGACTACGCC (SEQ ID NO: 608) |
| WPRE3 | GATAATCAACCTCTGGATTACAAAATTTGTGAAAGATTGACTGGTATTC |
| | TTAACTATGTTGCTCCTTTTACGCTATGTGGATACGCTGCTTTAATGCCT |
| | TTGTATCATGCTATTGCTTCCCGTATGGCTTTCATTTTCTCCTCCTTGTAT |
| | AAATCCTGGTTAGTTCTTGCCACGGCGGAACTCATCGCCGCCTGCCTTG |
| | CCCGCTGCTGGACAGGGGCTCGGCTGTTGGGCACTGACAATTCCGTGG |
| | (SEQ ID NO: 609) |
| SV-40 poly A | AACTTGTTTATTGCAGCTTATAATGGTTACAAATAAAGCAATAGCATCA |
| | CAAATTTCACAAATAAAGCATTTTTTTCACTGCATTCTAGTTGTGGTTTG |
| | TCCAAACTCATCAATGTATCTTA (SEQ ID NO: 533) |
| 3′ITR | Aggaacccctagtgatggagttggccactccctctctgcgcgctcgctcgctcactgaggccgggcgaccaaaggtc |
| | gcccgacgcccgggctttgcccgggcggcctcagtgagcgagcgagcgcgcagctgcctgcagg (SEQ ID |
| | NO: 598) |

[0623] In some embodiments, an AAV vector comprising a nucleic acid encoding a CAG-targeting Cas13d composition comprises from 5′ to 3′: a sequence encoding a 5′ ITR (a first ITR), a sequence encoding an human U6 promoter, a dCas13d seq212 direct repeat, a sequence encoding a CAG guide 3 spacer sequence, a sequence encoding an EFS promoter, a sequence encoding a kozak sequence, a sequence encoding a dCas13d seq212 protein, a sequence encoding a linker sequence, a sequence encoding an SV-40 NLS, a sequence encoding a linker sequence, a sequence encoding an HA tag, a sequence encoding a WPRE, a sequence encoding an SV-40 polyA, and a 3′ ITR (a second ITR). In some embodiments, the CAG-targeting Cas13d composition is arranged as depicted in Table L.

TABLE L
Vector encoding a CAG-repeat targeting dCas13d fusion

| Plasmid | |
|---|---|
| Element | Nucleic Acid Sequences |
| 5′ ITR | Cctgcaggcagctgcgcgctcgctcgctcactgaggccgcccgggcgtcgggcgacctttggtcgcccggcctcag |
| | tgagcgagcgagcgcgcagagagggagtggccaactccatcactaggggttcct (SEQ ID NO: 597) |
| Human U6 | Gagggcctatttcccatgattccttcatatttgcatatacgatacaaggctgttagagagataattggaattaatttgactgt |
| promoter | aaacacaaagatattagtacaaaatacgtgacgtagaaagtaataatttcttgggtagtttgcagttttaaaattatgttttaa |
| | aatggactatcatatgcttaccgtaacttgaaagtatttcgatttcttggctttatatatcttgtggaaaggacgaaacacc |
| | (SEQ ID NO: 519) |
| Seq212 direct | Tagccctgcagtaaggcagggttctaagac (SEQ ID NO: 596) |
| repeat (DR) | |
| Spacer (CAG | Ctgctgctgctgctgctgctgctgct (SEQ ID NO: 459) |
| guide 3) | |
| EFS promoter | Taggtcttgaaaggagtgggaattggctccggtgcccgtcagtgggcagagcgcacatogcccacagtccccgaga |
| | agttggggggaggggtcggcaattgatccggtgcctagagaaggtggcgcggggtaaactgggaaagtgatgtcgt |
| | gtactggctccgcctttttcccgagggtgggggagaaccgtatataagtgcagtagtcgccgtgaacgttctttttcgcaa |
| | cgggtttgccgccagaacacagg (SEQ ID NO: 520) |
| Kozak Sequence | GCCGCCACCATG (SEQ ID NO: 529) |
| Dead Seq212 | AAGAAGAAGCACCAGAGCGCCGCCGAGAAGAGGCAAGTGAAGAAGCT |
| | CAAGAATCAAGAGAAGGCCCAGAAGTACGCTAGCGAGCCTTCCCCCCT |
| | CCAGAGCGATACAGCTGGCGTGGAATGCTCCCAGAAAAAGACAGTCGT |
| | CAGCCACATTGCCAGCTCCAAGACACTGGCCAAGGCTATGGGACTCAA |
| | ATCCACACTGGTCATGGGCGACAAGCTGGTCATCACCAGCTTTGCTGCT |
| | AGCAAGGCTGTCGGAGGCGCTGGCTACAAAAGCGCTAACATTGAAAAA |
| | ATCACAGATCTGCAAGGAAGGGTCATTGAGGAGCACGAAAGGATGTTT |
| | AGCGCCGATGTCGGAGAGAAAAATATCGAACTGAGCAAGAATGACTGC |
| | CACACCAACGTCAACAACCCCGTGGTGACCAACATCGGAAAGGATTAC |
| | ATCGGACTGAAATCTAGGCTGGAGCAAGAGTTTTTCGGCAAGACATTC |
| | GAGAATGACAATCTGCATGTGCAGCTGGCCTACAATATCCTCGACATCA |
| | AGAAAATTCTGGGAACCTATGTGAACAATATCATTTATATCTTCTACAA |
| | TCTGAATAGGGCTGGCACCGGCAGAGATGAGAGGATGTATGACGACCT |
| | CATCGGCACACTGTACGCTTACAAACCCATGGAGGCTCAACAGACCTAT |
| | CTGCTCAAAGGCGACAAGGATATGAGGAGGTTTGAGGAGGTGAAACAG |
| | CTGCTGCAAAACACCTCCGCTTACTATGTGTATTACGGCACACTGTTCG |
| | AGAAGGTGAAGGCTAAGAGCAAGAAGGAACAGAGGGCTAAGGAGGCC |
| | GAAATCGACGCTTGTACCGCCCATAACTACGATGTGCTGAGACTGCTGT |
| | CCCTCATGAGGCAGCTGTGCATGCACTCCGTCGCTGGAACAGCCTTTAA |
| | GCTGGCTGAGTCCGCTCTGTTCAACATTGAGGATGTGCTCAGCGCCGAT |
| | CTGAAGGAAATCCTCGATGAAGCCTTCTCCGGCGCCGTGAACAAGCTC |
| | AATGACGGATTCGTGCAGCACTCCGGCAACAATCTGTACGTGCTCCAGC |
| | AGCTGTACCCTAATGAGACCATCGAGAGAATCGCCGAGAAGTACTACA |
| | GACTCACCGTGAGGAAGGAGGATCTGAACATGGGAGTCAACATTAAAA |
| | AGCTGAGGGAGCTGATCGTGGGCCAATACTTTCCCGAGGTCCTCGACA |
| | AAGAATACGACCTCTCCAAGAATGGAGACAGCGTGGTGACATACAGAA |
| | GCAAGATTTATACCGTGATGAATTACATTCTGCTGTATTACCTCGAGGA |
| | CCACGACTCCAGCAGAGAAAGCATGGTCGAAGCTCTGAGACAAAACAG |
| | AGAGGGCGATGAAGGCAAGGAGGAGATCTATAGACAGTTTGCCAAGA |
| | AGGTGTGGAACGGCGTGTCCGGACTGTTTGGCGTGTGTCTGAACCTCTT |
| | CAAGACCGAAAAGAGAAACAAGTTTAGGAGCAAAGTCGCCCTCCCCGA |
| | TGTGTCCGGCGCTGCCTATATGCTCTCCTCCGAGAACATCGACTACTTT |
| | GTCAAGATGCTCTTCTTTGTGTGTAAGTTTCTGGATGGCAAAGAAATCA |
| | ACGAGCTGCTGTGCGCTCTGATCAACAAATTTGATAATATTGCCGATAT |
| | TCTGGATGCTGCCGCTCAATGTGGCTCCTCCGTCTGGTTCGTGGACAGC |
| | TATAGGTTCTTCGAGAGATCTAGGAGGATTAGCGCCCAGATTAGAATCG |
| | TGAAGAACATCGCTTCCAAGGATTTTAAGAAATCCAAGAAGGATTCCG |
| | ATGAGAGCTACCCCGAGCAGCTGTATCTGGATGCTCTGGCTCTGCTCGG |
| | AGACGTCATCTCCAAGTACAAGCAGAATAGAGATGGCAGCGTCGTCAT |
| | CGATGACCAAGGCAATGCCGTGCTGACAGAGCAATACAAGAGGTTTAG |
| | ATATGAATTTTTCGAGGAGATCAAGAGGGACGAAAGCGGCGGCATCAA |
| | GTACAAGAAGTCCGGAAAACCCGAGTACAACCATCAGAGAAGGAATTT |
| | TATTCTGAATAATGTGCTGAAAAGCAAATGGTTTTTCTATGTGGTGAAG |
| | TACAATAGGCCCAGCAGCTGCAGAGAACTGATGAAGAATAAGGAAATT |
| | CTGAGGTTCGTGCTGAGAGACATCCCCGACTCCCAAGTGAGAAGATAC |
| | TTTAAGGCCGTCCAAGGAGAGGAAGCTTACGCTAGCGCCGAAGCTATG |
| | AGGACAAGACTGGTCGACGCTCTGTCCCAATTTAGCGTCACAGCTTGTC |
| | TGGATGAAGTGGGCGGCATGACAGACAAGGAATTCGCCTCCCAGAGGG |
| | CCGTCGATAGCAAAGAAAAACTGAGAGCCATCATCAGACTGTATCTGA |
| | CAGTCGCCTATCTGATTACCAAGAGCATGGTGAAGGTGAATACAAGGT |
| | TTAGCATTGCCTTTAGCGTGCTGGAGAGGGACTACTATCTGCTCATTGA |
| | CGGCAAGAAGAAATCCAGCGACTACACCGGAGAGGATATGCTGGCTCT |
| | GACCAGAAAATTTGTGGGCGAAGATGCTGGACTGTATAGAGAGTGGAA |
| | AGAGAAGAACGCTGAAGCCAAGGACAAATATTTTGACAAGGCCGAAA |
| | GGAAGAAGGTGCTGAGACAGAACGATAAGATGATCAGAAAGATGCAC |
| | TTCACACCCCACTCCCTCAATTACGTCCAAAAGAATCTCGAAAGCGTCC |
| | AGAGCAACGGACTGGCCGCCGTCATCAAGGAATATAGAAATGCCGTCG |
| | CTCACCTCAATATCATCAATAGACTGGACGAGTACATTGGCTCCGCTAG |
| | GGCTGATAGCTACTACTCTCTGTACTGTTACTGCCTCCAAATGTATCTGA |
| | GCAAGAACTTCAGCGTGGGCTACCTCATCAACGTGCAAAAGCAGCTGG |
| | AGGAGCACCACACCTACATGAAGGATCTCATGTGGCTGCTCAACATCCC |
| | CTTCGCTTACAACCTCGCCAGATACgcAAATCTGTCCAACGAAAAACTCT |
| | TTTACGACGAGGAAGCCGCCGCCGAAAAGGCTGACAAGGCTGAGAACG |
| | AGAGAGGCGAA (SEQ ID NO: 604) |
| Linker | GGAAGC |
| SV-40 NLS | CCCAAGAAGAAAAGGAAGGTC (SEQ ID NO: 532) |
| Linker | GAGGAC |
| HA Tag | TACCCCTACGATGTGCCCGACTACGCC (SEQ ID NO: 608) |
| WPRE3 | GATAATCAACCTCTGGATTACAAAATTTGTGAAAGATTGACTGGTATTC |
| | TTAACTATGTTGCTCCTTTTACGCTATGTGGATACGCTGCTTTAATGCCT |
| | TTGTATCATGCTATTGCTTCCCGTATGGCTTTCATTTTCTCCTCCTTGTAT |
| | AAATCCTGGTTAGTTCTTGCCACGGCGGAACTCATCGCCGCCTGCCTTG |
| | CCCGCTGCTGGACAGGGGCTCGGCTGTTGGGCACTGACAATTCCGTGG |
| | (SEQ ID NO: 609) |
| SV-40 poly A | AACTTGTTTATTGCAGCTTATAATGGTTACAAATAAAGCAATAGCATCA |
| | CAAATTTCACAAATAAAGCATTTTTTTCACTGCATTCTAGTTGTGGTTTG |
| | TCCAAACTCATCAATGTATCTTA (SEQ ID NO: 533) |
| 3′ITR | Aggaacccctagtgatggagttggccactccctctctgcgcgctcgctcgctcactgaggccgggcgaccaaaggtc |
| | gcccgacgcccgggctttgcccgggcggcctcagtgagcgagcgagcgcgcagctgcctgcagg (SEQ ID |
| | NO: 598) |

[0624] In some embodiments, an AAV vector comprising a nucleic acid encoding a CA-targeting Cas13d composition comprises from 5′ to 3′: a sequence encoding a 5′ ITR (a first ITR), a sequence encoding an human U6 promoter, a dCas13d seq212 direct repeat, a sequence encoding a CAG guide 3 spacer sequence, a sequence encoding an EFS promoter, a sequence encoding a kozak sequence, a sequence encoding an SV-40 NLS, a sequence encoding a linker, a sequence encoding a dCas13d seq212 protein, a sequence encoding a linker sequence, a sequence encoding an E17 endonuclease, a sequence encoding a linker sequence, a sequence encoding a myc tag, a sequence encoding a WPRE, a sequence encoding an SV-40 polyA, and a 3′ ITR (a second ITR). In some embodiments, the CAG-targeting Cas13d composition is arranged as depicted in Table M. In some embodiments, the vector set forth in Table M is referred to as A01545.

TABLE M
Vector A01545 encoding a CAG-repeat targeting dCas13d fusion

| Plasmid | |
|---|---|
| Element | Nucleic Acid Sequences |
| 5′ ITR | Cctgcaggcagctgcgcgctcgctcgctcactgaggccgcccgggcgtcgggcgacctttggtcgcccggcctcag |
| | tgagcgagcgagcgcgcagagagggagtggccaactccatcactaggggttcct (SEQ ID NO: 597) |
| Human U6 | Gagggcctatttcccatgattccttcatatttgcatatacgatacaaggctgttagagagataattggaattaatttgactgt |
| promoter | aaacacaaagatattagtacaaaatacgtgacgtagaaagtaataatttcttgggtagtttgcagttttaaaattatgttttaa |
| | aatggactatcatatgcttaccgtaacttgaaagtatttcgatttcttggctttatatatcttgtggaaaggacgaaacacc |
| | (SEQ ID NO: 519) |
| Seq212 direct | Tagccctgcagtaaggcagggttctaagac (SEQ ID NO: 596) |
| repeat (DR) | |
| Spacer (CAG | Ctgctgctgctgctgctgctgctgct (SEQ ID NO: 459) |
| guide 3) | |
| EFS promoter | Taggtcttgaaaggagtgggaattggctccggtgcccgtcagtgggcagagcgcacatogcccacagtccccgaga |
| | agttggggggaggggtcggcaattgatccggtgcctagagaaggtggcgcggggtaaactgggaaagtgatgtcgt |
| | gtactggctccgcctttttcccgaggggggggagaaccgtatataagtgcagtagtcgccgtgaacgttctttttcgcaa |
| | cgggtttgccgccagaacacagg (SEQ ID NO: 520) |
| Kozak Sequence | GCCGCCACCATGG (SEQ ID NO: 529) |
| SV40 NLS | CCCAAGAAGAAAAGGAAGGTC (SEQ ID NO: 532) |
| Linker | ggaGGATCT |
| Dead Seq212 | AAGAAGAAGCACCAGAGCGCCGCCGAGAAGAGGCAAGTGAAGAAGCT |
| | CAAGAATCAAGAGAAGGCCCAGAAGTACGCTAGCGAGCCTTCCCCCCT |
| | CCAGAGCGATACAGCTGGCGTGGAATGCTCCCAGAAAAAGACAGTCGT |
| | CAGCCACATTGCCAGCTCCAAGACACTGGCCAAGGCTATGGGACTCAA |
| | ATCCACACTGGTCATGGGCGACAAGCTGGTCATCACCAGCTTTGCTGCT |
| | AGCAAGGCTGTCGGAGGCGCTGGCTACAAAAGCGCTAACATTGAAAAA |
| | ATCACAGATCTGCAAGGAAGGGTCATTGAGGAGCACGAAAGGATGTTT |
| | AGCGCCGATGTCGGAGAGAAAAATATCGAACTGAGCAAGAATGACTGC |
| | CACACCAACGTCAACAACCCCGTGGTGACCAACATCGGAAAGGATTAC |
| | ATCGGACTGAAATCTAGGCTGGAGCAAGAGTTTTTCGGCAAGACATTC |
| | GAGAATGACAATCTGCATGTGCAGCTGGCCTACAATATCCTCGACATCA |
| | AGAAAATTCTGGGAACCTATGTGAACAATATCATTTATATCTTCTACAA |
| | TCTGAATAGGGCTGGCACCGGCAGAGATGAGAGGATGTATGACGACCT |
| | CATCGGCACACTGTACGCTTACAAACCCATGGAGGCTCAACAGACCTAT |
| | CTGCTCAAAGGCGACAAGGATATGAGGAGGTTTGAGGAGGTGAAACAG |
| | CTGCTGCAAAACACCTCCGCTTACTATGTGTATTACGGCACACTGTTCG |
| | AGAAGGTGAAGGCTAAGAGCAAGAAGGAACAGAGGGCTAAGGAGGCC |
| | GAAATCGACGCTTGTACCGCCCATAACTACGATGTGCTGAGACTGCTGT |
| | CCCTCATGAGGCAGCTGTGCATGCACTCCGTCGCTGGAACAGCCTTTAA |
| | GCTGGCTGAGTCCGCTCTGTTCAACATTGAGGATGTGCTCAGCGCCGAT |
| | CTGAAGGAAATCCTCGATGAAGCCTTCTCCGGCGCCGTGAACAAGCTC |
| | AATGACGGATTCGTGCAGCACTCCGGCAACAATCTGTACGTGCTCCAGC |
| | AGCTGTACCCTAATGAGACCATCGAGAGAATCGCCGAGAAGTACTACA |
| | GACTCACCGTGAGGAAGGAGGATCTGAACATGGGAGTCAACATTAAAA |
| | AGCTGAGGGAGCTGATCGTGGGCCAATACTTTCCCGAGGTCCTCGACA |
| | AAGAATACGACCTCTCCAAGAATGGAGACAGCGTGGTGACATACAGAA |
| | GCAAGATTTATACCGTGATGAATTACATTCTGCTGTATTACCTCGAGGA |
| | CCACGACTCCAGCAGAGAAAGCATGGTCGAAGCTCTGAGACAAAACAG |
| | AGAGGGCGATGAAGGCAAGGAGGAGATCTATAGACAGTTTGCCAAGA |
| | AGGTGTGGAACGGCGTGTCCGGACTGTTTGGCGTGTGTCTGAACCTCTT |
| | CAAGACCGAAAAGAGAAACAAGTTTAGGAGCAAAGTCGCCCTCCCCGA |
| | TGTGTCCGGCGCTGCCTATATGCTCTCCTCCGAGAACATCGACTACTTT |
| | GTCAAGATGCTCTTCTTTGTGTGTAAGTTTCTGGATGGCAAAGAAATCA |
| | ACGAGCTGCTGTGCGCTCTGATCAACAAATTTGATAATATTGCCGATAT |
| | TCTGGATGCTGCCGCTCAATGTGGCTCCTCCGTCTGGTTCGTGGACAGC |
| | TATAGGTTCTTCGAGAGATCTAGGAGGATTAGCGCCCAGATTAGAATCG |
| | TGAAGAACATCGCTTCCAAGGATTTTAAGAAATCCAAGAAGGATTCCG |
| | ATGAGAGCTACCCCGAGCAGCTGTATCTGGATGCTCTGGCTCTGCTCGG |
| | AGACGTCATCTCCAAGTACAAGCAGAATAGAGATGGCAGCGTCGTCAT |
| | CGATGACCAAGGCAATGCCGTGCTGACAGAGCAATACAAGAGGTTTAG |
| | ATATGAATTTTTCGAGGAGATCAAGAGGGACGAAAGCGGCGGCATCAA |
| | GTACAAGAAGTCCGGAAAACCCGAGTACAACCATCAGAGAAGGAATTT |
| | TATTCTGAATAATGTGCTGAAAAGCAAATGGTTTTTCTATGTGGTGAAG |
| | TACAATAGGCCCAGCAGCTGCAGAGAACTGATGAAGAATAAGGAAATT |
| | CTGAGGTTCGTGCTGAGAGACATCCCCGACTCCCAAGTGAGAAGATAC |
| | TTTAAGGCCGTCCAAGGAGAGGAAGCTTACGCTAGCGCCGAAGCTATG |
| | AGGACAAGACTGGTCGACGCTCTGTCCCAATTTAGCGTCACAGCTTGTC |
| | TGGATGAAGTGGGCGGCATGACAGACAAGGAATTCGCCTCCCAGAGGG |
| | CCGTCGATAGCAAAGAAAAACTGAGAGCCATCATCAGACTGTATCTGA |
| | CAGTCGCCTATCTGATTACCAAGAGCATGGTGAAGGTGAATACAAGGT |
| | TTAGCATTGCCTTTAGCGTGCTGGAGAGGGACTACTATCTGCTCATTGA |
| | CGGCAAGAAGAAATCCAGCGACTACACCGGAGAGGATATGCTGGCTCT |
| | GACCAGAAAATTTGTGGGCGAAGATGCTGGACTGTATAGAGAGTGGAA |
| | AGAGAAGAACGCTGAAGCCAAGGACAAATATTTTGACAAGGCCGAAA |
| | GGAAGAAGGTGCTGAGACAGAACGATAAGATGATCAGAAAGATGCAC |
| | TTCACACCCCACTCCCTCAATTACGTCCAAAAGAATCTCGAAAGCGTCC |
| | AGAGCAACGGACTGGCCGCCGTCATCAAGGAATATAGAAATGCCGTCG |
| | CTgcCCTCAATATCATCAATAGACTGGACGAGTACATTGGCTCCGCTAG |
| | GGCTGATAGCTACTACTCTCTGTACTGTTACTGCCTCCAAATGTATCTGA |
| | GCAAGAACTTCAGCGTGGGCTACCTCATCAACGTGCAAAAGCAGCTGG |
| | AGGAGCACCACACCTACATGAAGGATCTCATGTGGCTGCTCAACATCCC |
| | CTTCGCTTACAACCTCGCCAGATACAAAAATCTGTCCAACGAAAAACTC |
| | TTTTACGACGAGGAAGCCGCCGCCGAAAAGGCTGACAAGGCTGAGAAC |
| | GAGAGAGGCGAA (SEQ ID NO: 605) |
| Linker | GGTGGAGGCggtAGCGGAGGtGGCGGAAGTGGCGGAGGAGGTAGT (SEQ |
| | ID NO: 612) |
| E17 | Ggtggtggcacccctaaggctcccaacctggagcctccactcccagaagaggaaaaggagggcagcgacctgaga |
| | ccagtggtcatcgatgggagcaacgtggccatgagccatgggaacaaggaggtgttctcctgccggggcatcctgct |
| | ggcagtgaactggtttctggagcggggccacacagacatcacagtgtttgtgccatcctggaggaaggagcagcctc |
| | ggcccgacgtgcccatcacagaccagcacatcctgcgggaactggagaagaagaagatcctggtgttcacaccatca |
| | cgacgcgtgggtggcaagcgggtggtgtgctatgacgacagattcattgtgaagctggcctacgagtctgacgggatc |
| | gtggtttccaacgacacataccgtgacctccaaggcgagcggcaggagtggaagcgcttcatcgaggagcggctgct |
| | catgtactccttcgtcaatgacaagtttatgccccctgatgacccactgggccggcacgggcccagcctggacaacttc |
| | ctgcgtaagaagccactcactttggag (SEQ ID NO: 611) |
| Linker | GGCGGAtct |
| Myc Tag | GAGCAgAAACTGATTAGcGAAGAgGATCTC (SEQ ID NO: 610) |
| WPRE3 | GATAATCAACCTCTGGATTACAAAATTTGTGAAAGATTGACTGGTATTC |
| | TTAACTATGTTGCTCCTTTTACGCTATGTGGATACGCTGCTTTAATGCCT |
| | TTGTATCATGCTATTGCTTCCCGTATGGCTTTCATTTTCTCCTCCTTGTAT |
| | AAATCCTGGTTAGTTCTTGCCACGGCGGAACTCATCGCCGCCTGCCTTG |
| | CCCGCTGCTGGACAGGGGCTCGGCTGTTGGGCACTGACAATTCCGTGG |
| | (SEQ ID NO: 609) |
| SV-40 poly A | AACTTGTTTATTGCAGCTTATAATGGTTACAAATAAAGCAATAGCATCA |
| | CAAATTTCACAAATAAAGCATTTTTTTCACTGCATTCTAGTTGTGGTTTG |
| | TCCAAACTCATCAATGTATCTTA (SEQ ID NO: 533) |
| 3′ITR | Aggaacccctagtgatggagttggccactccctctctgcgcgctcgctcgctcactgaggccgggcgaccaaaggtc |
| | gcccgacgcccgggctttgcccgggcggcctcagtgagcgagcgagcgcgcagctgcctgcagg (SEQ ID |
| | NO: 598) |

[0625] In some embodiments, an AAV vector comprising a nucleic acid encoding a CAG-targeting Cas13d composition comprises from 5′ to 3′: a sequence encoding a 5′ ITR (a first ITR), a sequence encoding an human U6 promoter, a dCas13d seq22 direct repeat, a sequence encoding a CAG guide 3 spacer sequence, a sequence encoding an EFS promoter, a sequence encoding a kozak sequence, a sequence encoding an SV-40 NLS, a sequence encoding a linker, a sequence encoding a dCas13d seq212 protein, a sequence encoding a linker sequence, a sequence encoding an E17 endonuclease, a sequence encoding a linker sequence, a sequence encoding a myc tag, a sequence encoding a WPRE, a sequence encoding an SV-40 polyA, and a 3′ ITR (a second ITR). In some embodiments, the CAG-targeting Cas3d composition is arranged as depicted in Table N. In some embodiments, the vector set forth in Table N is referred to as A01553.

TABLE N
Vector A01553 encoding a CAG-repeat targeting dCas13d fusion

| Plasmid | |
|---|---|
| Element | Nucleic Acid Sequences |
| 5′ ITR | Cctgcaggcagctgcgcgctcgctcgctcactgaggccgcccgggcgtcgggcgacctttggtcgcccggcctcag |
| | tgagcgagcgagcgcgcagagagggagtggccaactccatcactaggggttcct (SEQ ID NO: 597) |
| Human U6 | Gagggcctatttcccatgattccttcatatttgcatatacgatacaaggctgttagagagataattggaattaatttgactgt |
| promoter | aaacacaaagatattagtacaaaatacgtgacgtagaaagtaataatttcttgggtagtttgcagttttaaaattatgttttaa |
| | aatggactatcatatgcttaccgtaacttgaaagtatttcgatttcttggctttatatatcttgtggaaaggacgaaacacc |
| | (SEQ ID NO: 519) |
| Seq212 direct | Tagccctgcagtaaggcagggttctaagac (SEQ ID NO: 596) |
| repeat (DR) | |
| Spacer (CAG | Ctgctgctgctgctgctgctgctgct (SEQ ID NO: 459) |
| guide 3) | |
| EFS promoter | Taggtcttgaaaggagtgggaattggctccggtgcccgtcagtgggcagagcgcacatcgcccacagtccccgaga |
| | agttggggggaggggtcggcaattgatccggtgcctagagaaggtggcgcggggtaaactgggaaagtgatgtcgt |
| | gtactggctccgcctttttcccgagggtgggggagaaccgtatataagtgcagtagtcgccgtgaacgttctttttcgcaa |
| | cgggtttgccgccagaacacagg (SEQ ID NO: 520) |
| Kozak Sequence | GCCGCCACCATGG (SEQ ID NO: 529) |
| SV40 NLS | CCCAAGAAGAAAAGGAAGGTC (SEQ ID NO: 532) |
| Linker | ggaGGATCT |
| Dead Seq212 | AAGAAGAAGCACCAGAGCGCCGCCGAGAAGAGGCAAGTGAAGAAGCT |
| | CAAGAATCAAGAGAAGGCCCAGAAGTACGCTAGCGAGCCTTCCCCCCT |
| | CCAGAGCGATACAGCTGGCGTGGAATGCTCCCAGAAAAAGACAGTCGT |
| | CAGCCACATTGCCAGCTCCAAGACACTGGCCAAGGCTATGGGACTCAA |
| | ATCCACACTGGTCATGGGCGACAAGCTGGTCATCACCAGCTTTGCTGCT |
| | AGCAAGGCTGTCGGAGGCGCTGGCTACAAAAGCGCTAACATTGAAAAA |
| | ATCACAGATCTGCAAGGAAGGGTCATTGAGGAGCACGAAAGGATGTTT |
| | AGCGCCGATGTCGGAGAGAAAAATATCGAACTGAGCAAGAATGACTGC |
| | CACACCAACGTCAACAACCCCGTGGTGACCAACATCGGAAAGGATTAC |
| | ATCGGACTGAAATCTAGGCTGGAGCAAGAGTTTTTCGGCAAGACATTC |
| | GAGAATGACAATCTGCATGTGCAGCTGGCCTACAATATCCTCGACATCA |
| | AGAAAATTCTGGGAACCTATGTGAACAATATCATTTATATCTTCTACAA |
| | TCTGAATAGGGCTGGCACCGGCAGAGATGAGAGGATGTATGACGACCT |
| | CATCGGCACACTGTACGCTTACAAACCCATGGAGGCTCAACAGACCTAT |
| | CTGCTCAAAGGCGACAAGGATATGAGGAGGTTTGAGGAGGTGAAACAG |
| | CTGCTGCAAAACACCTCCGCTTACTATGTGTATTACGGCACACTGTTCG |
| | AGAAGGTGAAGGCTAAGAGCAAGAAGGAACAGAGGGCTAAGGAGGCC |
| | GAAATCGACGCTTGTACCGCCCATAACTACGATGTGCTGAGACTGCTGT |
| | CCCTCATGgcGCAGCTGTGCATGgcCTCCGTCGCTGGAACAGCCTTTAAG |
| | CTGGCTGAGTCCGCTCTGTTCAACATTGAGGATGTGCTCAGCGCCGATC |
| | TGAAGGAAATCCTCGATGAAGCCTTCTCCGGCGCCGTGAACAAGCTCA |
| | ATGACGGATTCGTGCAGCACTCCGGCAACAATCTGTACGTGCTCCAGCA |
| | GCTGTACCCTAATGAGACCATCGAGAGAATCGCCGAGAAGTACTACAG |
| | ACTCACCGTGAGGAAGGAGGATCTGAACATGGGAGTCAACATTAAAAA |
| | GCTGAGGGAGCTGATCGTGGGCCAATACTTTCCCGAGGTCCTCGACAA |
| | AGAATACGACCTCTCCAAGAATGGAGACAGCGTGGTGACATACAGAAG |
| | CAAGATTTATACCGTGATGAATTACATTCTGCTGTATTACCTCGAGGAC |
| | CACGACTCCAGCAGAGAAAGCATGGTCGAAGCTCTGAGACAAAACAGA |
| | GAGGGCGATGAAGGCAAGGAGGAGATCTATAGACAGTTTGCCAAGAA |
| | GGTGTGGAACGGCGTGTCCGGACTGTTTGGCGTGTGTCTGAACCTCTTC |
| | AAGACCGAAAAGAGAAACAAGTTTAGGAGCAAAGTCGCCCTCCCCGAT |
| | GTGTCCGGCGCTGCCTATATGCTCTCCTCCGAGAACATCGACTACTTTG |
| | TCAAGATGCTCTTCTTTGTGTGTAAGTTTCTGGATGGCAAAGAAATCAA |
| | CGAGCTGCTGTGCGCTCTGATCAACAAATTTGATAATATTGCCGATATT |
| | CTGGATGCTGCCGCTCAATGTGGCTCCTCCGTCTGGTTCGTGGACAGCT |
| | ATAGGTTCTTCGAGAGATCTAGGAGGATTAGCGCCCAGATTAGAATCGT |
| | GAAGAACATCGCTTCCAAGGATTTTAAGAAATCCAAGAAGGATTCCGA |
| | TGAGAGCTACCCCGAGCAGCTGTATCTGGATGCTCTGGCTCTGCTCGGA |
| | GACGTCATCTCCAAGTACAAGCAGAATAGAGATGGCAGCGTCGTCATC |
| | GATGACCAAGGCAATGCCGTGCTGACAGAGCAATACAAGAGGTTTAGA |
| | TATGAATTTTTCGAGGAGATCAAGAGGGACGAAAGCGGCGGCATCAAG |
| | TACAAGAAGTCCGGAAAACCCGAGTACAACCATCAGAGAAGGAATTTT |
| | ATTCTGAATAATGTGCTGAAAAGCAAATGGTTTTTCTATGTGGTGAAGT |
| | ACAATAGGCCCAGCAGCTGCAGAGAACTGATGAAGAATAAGGAAATTC |
| | TGAGGTTCGTGCTGAGAGACATCCCCGACTCCCAAGTGAGAAGATACTT |
| | TAAGGCCGTCCAAGGAGAGGAAGCTTACGCTAGCGCCGAAGCTATGAG |
| | GACAAGACTGGTCGACGCTCTGTCCCAATTTAGCGTCACAGCTTGTCTG |
| | GATGAAGTGGGCGGCATGACAGACAAGGAATTCGCCTCCCAGAGGGCC |
| | GTCGATAGCAAAGAAAAACTGAGAGCCATCATCAGACTGTATCTGACA |
| | GTCGCCTATCTGATTACCAAGAGCATGGTGAAGGTGAATACAAGGTTTA |
| | GCATTGCCTTTAGCGTGCTGGAGAGGGACTACTATCTGCTCATTGACGG |
| | CAAGAAGAAATCCAGCGACTACACCGGAGAGGATATGCTGGCTCTGAC |
| | CAGAAAATTTGTGGGCGAAGATGCTGGACTGTATAGAGAGTGGAAAGA |
| | GAAGAACGCTGAAGCCAAGGACAAATATTTTGACAAGGCCGAAAGGA |
| | AGAAGGTGCTGAGACAGAACGATAAGATGATCAGAAAGATGCACTTCA |
| | CACCCCACTCCCTCAATTACGTCCAAAAGAATCTCGAAAGCGTCCAGAG |
| | CAACGGACTGGCCGCCGTCATCAAGGAATATgcAAATGCCGTCGCTgcCC |
| | TCAATATCATCAATAGACTGGACGAGTACATTGGCTCCGCTAGGGCTGA |
| | TAGCTACTACTCTCTGTACTGTTACTGCCTCCAAATGTATCTGAGCAAG |
| | AACTTCAGCGTGGGCTACCTCATCAACGTGCAAAAGCAGCTGGAGGAG |
| | CACCACACCTACATGAAGGATCTCATGTGGCTGCTCAACATCCCCTTCG |
| | CTTACAACCTCGCCAGATACAAAAATCTGTCCAACGAAAAACTCTTTTA |
| | CGACGAGGAAGCCGCCGCCGAAAAGGCTGACAAGGCTGAGAACGAGA |
| | GAGGCGAA (SEQ ID NO: 606) |
| Linker | GGTGGAGGCggtAGCGGAGGtGGCGGAAGTGGCGGAGGAGGTAGT (SEQ |
| | ID NO: 612) |
| E17 | Ggtggtggcacccctaaggctcccaacctggagcctccactcccagaagaggaaaaggagggcagcgacctgaga |
| | ccagtggtcatcgatgggagcaacgtggccatgagccatgggaacaaggaggtgttctcctgccggggcatcctgct |
| | ggcagtgaactggtttctggagcggggccacacagacatcacagtgtttgtgccatcctggaggaaggagcagcctc |
| | ggcccgacgtgcccatcacagaccagcacatcctgcgggaactggagaagaagaagatcctggtgttcacaccatca |
| | cgacgcgtgggtggcaagcgggtggtgtgctatgacgacagattcattgtgaagctggcctacgagtctgacgggatc |
| | gtggtttccaacgacacataccgtgacctccaaggcgagcggcaggagtggaagcgcttcatcgaggagcggctgct |
| | catgtactccttcgtcaatgacaagtttatgccccctgatgacccactgggccggcacgggcccagcctggacaacttc |
| | ctgcgtaagaagccactcactttggag (SEQ ID NO: 611) |
| Linker | GGCGGAtct |
| Myc Tag | GAGCAgAAACTGATTAGcGAAGAgGATCTC (SEQ ID NO: 610) |
| WPRE3 | GATAATCAACCTCTGGATTACAAAATTTGTGAAAGATTGACTGGTATTC |
| | TTAACTATGTTGCTCCTTTTACGCTATGTGGATACGCTGCTTTAATGCCT |
| | TTGTATCATGCTATTGCTTCCCGTATGGCTTTCATTTTCTCCTCCTTGTAT |
| | AAATCCTGGTTAGTTCTTGCCACGGCGGAACTCATCGCCGCCTGCCTTG |
| | CCCGCTGCTGGACAGGGGCTCGGCTGTTGGGCACTGACAATTCCGTGG |
| | (SEQ ID NO: 609) |
| SV-40 poly A | AACTTGTTTATTGCAGCTTATAATGGTTACAAATAAAGCAATAGCATCA |
| | CAAATTTCACAAATAAAGCATTTTTTTCACTGCATTCTAGTTGTGGTTTG |
| | TCCAAACTCATCAATGTATCTTA (SEQ ID NO: 533) |
| 3′ITR | Aggaacccctagtgatggagttggccactccctctctgcgcgctcgctcgctcactgaggccgggcgaccaaaggtc |
| | gcccgacgcccgggctttgcccgggcggcctcagtgagcgagcgagcgcgcagctgcctgcagg (SEQ ID |
| | NO: 598) |

[0626] In some embodiments, an AAV vector comprising a nucleic acid encoding a CAG-targeting Cas13d composition comprises from 5′ to 3′: a sequence encoding a 5′ ITR (a first ITR), a sequence encoding an human U6 promoter, a dCas13d seq212 direct repeat, a sequence encoding a CAG guide 3 spacer sequence, a sequence encoding an EFS promoter, a sequence encoding a kozak sequence, a sequence encoding an E17 endonuclease, a sequence encoding a linker sequence, a sequence encoding a dCas13d seq212 protein, a sequence encoding a linker sequence, a sequence encoding an SV-40 NLS, a sequence encoding a linker, a sequence encoding an HAtag, a sequence encoding a WPRE, a sequence encoding an SV-40 polyA, and a 3′ ITR (a second ITR). In some embodiments, the CAG-targeting Cas13d composition is arranged as depicted in Table 0.

TABLE O
Vector encoding a CAG-repeat targeting dCas13d fusion

| Plasmid | |
|---|---|
| Element | Nucleic Acid Sequences |
| 5′ ITR | Cctgcaggcagctgcgcgctcgctcgctcactgaggccgcccgggcgtcgggcgacctttggtcgcccggcctcag |
| | tgagcgagcgagcgcgcagagagggagtggccaactccatcactaggggttcct (SEQ ID NO: 597) |
| Human U6 | Gagggcctatttcccatgattccttcatatttgcatatacgatacaaggctgttagagagataattggaattaatttgactgt |
| promoter | aaacacaaagatattagtacaaaatacgtgacgtagaaagtaataatttcttgggtagtttgcagttttaaaattatgttttaa |
| | aatggactatcatatgcttaccgtaacttgaaagtatttcgatttcttggctttatatatottgtggaaaggacgaaacacc |
| | (SEQ ID NO: 519) |
| Seq212 direct | Tagccctgcagtaaggcagggttctaagac (SEQ ID NO: 596) |
| repeat (DR) | |
| Spacer (CAG | Ctgctgctgctgctgctgctgctgct (SEQ ID NO: 459) |
| guide 3) | |
| EFS promoter | Taggtcttgaaaggagtgggaattggctccggtgcccgtcagtgggcagagcgcacatcgcccacagtccccgaga |
| | agttggggggaggggtcggcaattgatccggtgcctagagaaggtggcgcggggtaaactgggaaagtgatgtcgt |
| | gtactggctccgcctttttcccgaggggggggagaaccgtatataagtgcagtagtcgccgtgaacgttctttttcgcaa |
| | cgggtttgccgccagaacacagg (SEQ ID NO: 520) |
| Kozak Sequence | GCCGCCACCATG (SEQ ID NO: 529) |
| E17 | Ggtggtggcacccctaaggctcccaacctggagcctccactcccagaagaggaaaaggagggcagcgacctgaga |
| | ccagtggtcatcgatgggagcaacgtggccatgagccatgggaacaaggaggtgttctcctgccggggcatcctgct |
| | ggcagtgaactggtttctggagcggggccacacagacatcacagtgtttgtgccatcctggaggaaggagcagcctc |
| | ggcccgacgtgcccatcacagaccagcacatcctgcgggaactggagaagaagaagatcctggtgttcacaccatca |
| | cgacgcgtgggtggcaagcgggtggtgtgctatgacgacagattcattgtgaagctggcctacgagtctgacgggatc |
| | gtggtttccaacgacacataccgtgacctccaaggcgagcggcaggagtggaagcgcttcatcgaggagcggctgct |
| | catgtactccttcgtcaatgacaagtttatgccccctgatgacccactgggccggcacgggcccagcctggacaacttc |
| | ctgcgtaagaagccactcactttggag (SEQ ID NO: 611) |
| Linker | GGTGGAGGCggtAGCGGAGGtGGCGGAAGTGGCGGAGGAGGTAGT (SEQ |
| | ID NO: 612) |
| Dead Seq212 | AAGAAGAAGCACCAGAGCGCCGCCGAGAAGAGGCAAGTGAAGAAGCT |
| | CAAGAATCAAGAGAAGGCCCAGAAGTACGCTAGCGAGCCTTCCCCCCT |
| | CCAGAGCGATACAGCTGGCGTGGAATGCTCCCAGAAAAAGACAGTCGT |
| | CAGCCACATTGCCAGCTCCAAGACACTGGCCAAGGCTATGGGACTCAA |
| | ATCCACACTGGTCATGGGCGACAAGCTGGTCATCACCAGCTTTGCTGCT |
| | AGCAAGGCTGTCGGAGGCGCTGGCTACAAAAGCGCTAACATTGAAAAA |
| | ATCACAGATCTGCAAGGAAGGGTCATTGAGGAGCACGAAAGGATGTTT |
| | AGCGCCGATGTCGGAGAGAAAAATATCGAACTGAGCAAGAATGACTGC |
| | CACACCAACGTCAACAACCCCGTGGTGACCAACATCGGAAAGGATTAC |
| | ATCGGACTGAAATCTAGGCTGGAGCAAGAGTTTTTCGGCAAGACATTC |
| | GAGAATGACAATCTGCATGTGCAGCTGGCCTACAATATCCTCGACATCA |
| | AGAAAATTCTGGGAACCTATGTGAACAATATCATTTATATCTTCTACAA |
| | TCTGAATAGGGCTGGCACCGGCAGAGATGAGAGGATGTATGACGACCT |
| | CATCGGCACACTGTACGCTTACAAACCCATGGAGGCTCAACAGACCTAT |
| | CTGCTCAAAGGCGACAAGGATATGAGGAGGTTTGAGGAGGTGAAACAG |
| | CTGCTGCAAAACACCTCCGCTTACTATGTGTATTACGGCACACTGTTCG |
| | AGAAGGTGAAGGCTAAGAGCAAGAAGGAACAGAGGGCTAAGGAGGCC |
| | GAAATCGACGCTTGTACCGCCCATAACTACGATGTGCTGAGACTGCTGT |
| | CCCTCATGgcGCAGCTGTGCATGgcCTCCGTCGCTGGAACAGCCTTTAAG |
| | CTGGCTGAGTCCGCTCTGTTCAACATTGAGGATGTGCTCAGCGCCGATC |
| | TGAAGGAAATCCTCGATGAAGCCTTCTCCGGCGCCGTGAACAAGCTCA |
| | ATGACGGATTCGTGCAGCACTCCGGCAACAATCTGTACGTGCTCCAGCA |
| | GCTGTACCCTAATGAGACCATCGAGAGAATCGCCGAGAAGTACTACAG |
| | ACTCACCGTGAGGAAGGAGGATCTGAACATGGGAGTCAACATTAAAAA |
| | GCTGAGGGAGCTGATCGTGGGCCAATACTTTCCCGAGGTCCTCGACAA |
| | AGAATACGACCTCTCCAAGAATGGAGACAGCGTGGTGACATACAGAAG |
| | CAAGATTTATACCGTGATGAATTACATTCTGCTGTATTACCTCGAGGAC |
| | CACGACTCCAGCAGAGAAAGCATGGTCGAAGCTCTGAGACAAAACAGA |
| | GAGGGCGATGAAGGCAAGGAGGAGATCTATAGACAGTTTGCCAAGAA |
| | GGTGTGGAACGGCGTGTCCGGACTGTTTGGCGTGTGTCTGAACCTCTTC |
| | AAGACCGAAAAGAGAAACAAGTTTAGGAGCAAAGTCGCCCTCCCCGAT |
| | GTGTCCGGCGCTGCCTATATGCTCTCCTCCGAGAACATCGACTACTTTG |
| | TCAAGATGCTCTTCTTTGTGTGTAAGTTTCTGGATGGCAAAGAAATCAA |
| | CGAGCTGCTGTGCGCTCTGATCAACAAATTTGATAATATTGCCGATATT |
| | CTGGATGCTGCCGCTCAATGTGGCTCCTCCGTCTGGTTCGTGGACAGCT |
| | ATAGGTTCTTCGAGAGATCTAGGAGGATTAGCGCCCAGATTAGAATCGT |
| | GAAGAACATCGCTTCCAAGGATTTTAAGAAATCCAAGAAGGATTCCGA |
| | TGAGAGCTACCCCGAGCAGCTGTATCTGGATGCTCTGGCTCTGCTCGGA |
| | GACGTCATCTCCAAGTACAAGCAGAATAGAGATGGCAGCGTCGTCATC |
| | GATGACCAAGGCAATGCCGTGCTGACAGAGCAATACAAGAGGTTTAGA |
| | TATGAATTTTTCGAGGAGATCAAGAGGGACGAAAGCGGCGGCATCAAG |
| | TACAAGAAGTCCGGAAAACCCGAGTACAACCATCAGAGAAGGAATTTT |
| | ATTCTGAATAATGTGCTGAAAAGCAAATGGTTTTTCTATGTGGTGAAGT |
| | ACAATAGGCCCAGCAGCTGCAGAGAACTGATGAAGAATAAGGAAATTC |
| | TGAGGTTCGTGCTGAGAGACATCCCCGACTCCCAAGTGAGAAGATACTT |
| | TAAGGCCGTCCAAGGAGAGGAAGCTTACGCTAGCGCCGAAGCTATGAG |
| | GACAAGACTGGTCGACGCTCTGTCCCAATTTAGCGTCACAGCTTGTCTG |
| | GATGAAGTGGGCGGCATGACAGACAAGGAATTCGCCTCCCAGAGGGCC |
| | GTCGATAGCAAAGAAAAACTGAGAGCCATCATCAGACTGTATCTGACA |
| | GTCGCCTATCTGATTACCAAGAGCATGGTGAAGGTGAATACAAGGTTTA |
| | GCATTGCCTTTAGCGTGCTGGAGAGGGACTACTATCTGCTCATTGACGG |
| | CAAGAAGAAATCCAGCGACTACACCGGAGAGGATATGCTGGCTCTGAC |
| | CAGAAAATTTGTGGGCGAAGATGCTGGACTGTATAGAGAGTGGAAAGA |
| | GAAGAACGCTGAAGCCAAGGACAAATATTTTGACAAGGCCGAAAGGA |
| | AGAAGGTGCTGAGACAGAACGATAAGATGATCAGAAAGATGCACTTCA |
| | CACCCCACTCCCTCAATTACGTCCAAAAGAATCTCGAAAGCGTCCAGAG |
| | CAACGGACTGGCCGCCGTCATCAAGGAATATgcAAATGCCGTCGCTgcCC |
| | TCAATATCATCAATAGACTGGACGAGTACATTGGCTCCGCTAGGGCTGA |
| | TAGCTACTACTCTCTGTACTGTTACTGCCTCCAAATGTATCTGAGCAAG |
| | AACTTCAGCGTGGGCTACCTCATCAACGTGCAAAAGCAGCTGGAGGAG |
| | CACCACACCTACATGAAGGATCTCATGTGGCTGCTCAACATCCCCTTCG |
| | CTTACAACCTCGCCAGATACAAAAATCTGTCCAACGAAAAACTCTTTTA |
| | CGACGAGGAAGCCGCCGCCGAAAAGGCTGACAAGGCTGAGAACGAGA |
| | GAGGCGAA (SEQ ID NO: 607) |
| Linker | GGAAGC |
| SV40 NLS | CCCAAGAAGAAAAGGAAGGTC (SEQ ID NO: 532) |
| Linker | GAGGAC |
| HA Tag | TACCCCTACGATGTGCCCGACTACGCC (SEQ ID NO: 608) |
| WPRE3 | GATAATCAACCTCTGGATTACAAAATTTGTGAAAGATTGACTGGTATTC |
| | TTAACTATGTTGCTCCTTTTACGCTATGTGGATACGCTGCTTTAATGCCT |
| | TTGTATCATGCTATTGCTTCCCGTATGGCTTTCATTTTCTCCTCCTTGTAT |
| | AAATCCTGGTTAGTTCTTGCCACGGCGGAACTCATCGCCGCCTGCCTTG |
| | CCCGCTGCTGGACAGGGGCTCGGCTGTTGGGCACTGACAATTCCGTGG |
| | (SEQ ID NO: 609) |
| SV-40 poly A | AACTTGTTTATTGCAGCTTATAATGGTTACAAATAAAGCAATAGCATCA |
| | CAAATTTCACAAATAAAGCATTTTTTTCACTGCATTCTAGTTGTGGTTTG |
| | TCCAAACTCATCAATGTATCTTA (SEQ ID NO: 533) |
| 3′ITR | Aggaacccctagtgatggagttggccactccctctctgcgcgctcgctcgctcactgaggccgggcgaccaaaggtc |
| | gcccgacgcccgggctttgcccgggcggcctcagtgagcgagcgagcgcgcagctgcctgcagg (SEQ ID |
| | NO: 598) |

### CAG-Targeting Cas13d PUF AAV Vectors

[0627] In some embodiments of the compositions of the disclosure, CAG-targeting PUF compositions are packaged as AAV vectors. In some embodiments, CAG-targeting PUF compositions packaged as AAV vectors are set forth in SEQ ID NOs 518, 528, 534, 536, and 539.

[0628] In some embodiments, an AAV vector comprising a nucleic acid encoding a CAG-repeat targeting PUF comprises from 5′ to 3′: a sequence encoding a 5′ ITR (a first ITR), a sequence encoding an EFS/UBB promoter, a sequence encoding a kozak sequence, a sequence encoding an 8PUF protein, a sequence encoding a linker, a sequence encoding a nuclease (E17), a sequence encoding a WPRE element, a sequence encoding an SV40 polyA sequence, and a 3′ ITR (a second ITR). In some embodiments, the CAG-targeting Cas13d composition is arranged as depicted in Table P. In some embodiments, the vector set forth in Table P is referred to as A01383.

TABLE P
Vector A01383 encoding a CAG-repeat targeting PUF-E17 fusion

| Plasmid | |
|---|---|
| Element | DNA Sequence |
| 5′ ITR | CCTGCAGGCAGCTGCGCGCTCGCTCGCTCACTGAGGCCGCCCGGGCGT |
| | CGGGCGACCTTTGGTCGCCCGGCCTCAGTGAGCGAGCGAGCGCGCAGA |
| | GAGGGAGTGGCCAACTCCATCACTAGGGGTTCCT (SEQ ID NO: 597) |
| EFS/UBB | GGGCAGAGCGCACATCGCCCACAGTCCCCGAGAAGTTGGGGGGAGGGGTCGG |
| Promoter | CAATTGAaCCGGTGCCTAGAGAAGGTGGCGCGGGGTAAACTGGGAAAGTGAT |
| | GTCGTGTACTGGCTCCGCCTTTTTCCCGAGGGTGGGGGAGAACCGTATATAAG |
| | TGCAGTAGTCGCCGTGAACGTTCTTTTTCGCAACGGGTTTGCCGCCAGAACAC |
| | AGaattccagGTAAGTCCCGCAGCCGTAACGACCTTGGGGGGGTGTGAGATTCTCA |
| | TTCTAATTTTGAAGAATATTAGGTGTAAAAGCAAGAAATACAATGATCCTGAG |
| | GTGACACGCTTATGTTTTACTTTTAAACTAG (SEQ ID NO: 613) |
| Kozak | Gccgccaccatg (SEQ ID NO: 529) |
| Sequence | |
| 8PUF | gGCCGCAGCCGCCTTTTGGAAGATTTTCGAAACAACCGGTACCCCAATT |
| | TACAACTGCGGGAGATTGCCGGACATATAATGGAATTTTCCCAAGACC |
| | AGCATGGGTCCAGATTCATTCGCCTGAAACTGGAGCGTGCCACACCAG |
| | CTGAGCGCCAGCTTGTCTTCAATGAAATCCTCCAGGCTGCCTACCAACT |
| | CATGGTGGATGTGTTTGGTAGTTACGTCATTGAAAAGTTCTTTGAATTT |
| | GGCAGTCTTGAACAGAAGCTGGCTTTGGCAGAACGGATTCGAGGTCAC |
| | GTCCTGTCATTGGCACTACAGATGTATGGCTGTCGTGTTATCCAGAAAG |
| | CTCTTGAGTTTATTCCTTCAGACCAGCAGAATGAGATGGTTCGGGAACT |
| | AGATGGCCATGTCTTGAAGTGTGTGAAAGATCAGAATGGCAGTTACGT |
| | GGTTCGCAAATGCATTGAATGTGTACAGCCCCAGTCTTTGCAATTTATC |
| | ATCGATGCGTTTAAGGGACAGGTATTTGCCTTATCCACACATCCTTATG |
| | GCTCCCGAGTGATTGAGAGAATCCTGGAGCACTGTCTCCCTGACCAGA |
| | CACTCCCTATTTTAGAGGAGCTTCACCAGCACACAGAGCAGCTTGTAC |
| | AGGATCAATATGGATGTTATGTAATCCAGCATGTACTGGAGCACGGTC |
| | GTCCTGAGGATAAAAGCAAAATTGTAGCAGAAATCCGAGGCAATGTAC |
| | TTGTATTGAGTCAGCACAAATTTGCAAGCTATGTTGTGCGCAAGTGTGT |
| | TACTCACGCCTCACGTACGGAGCGCGCTGTGCTCATCGATGAGGTGTG |
| | CACCATGAACGACGGTCCCCACAGTGCCTTATACACCATGATGAAGGA |
| | CCAGTATGCCAGCTACGTGGTCGAGAAGATGATTGACGTGGCGGAGCC |
| | AGGCCAGCGGAAGATCGTCATGCATAAGATCCGACCCCACATCGCAAC |
| | TCTTCGTAAGTACACCTATGGCAAGCACATTCTGGCCAAGCTGGAGAA |
| | GTACTACATGAAGAACGGTGTTGACTTAGGC (SEQ ID NO: 614) |
| Linker | GTGGATACTGCCAATGGCAGC (SEQ ID NO: 615) |
| E17 | Ggtggtggcacccctaaggctcccaacctggagcctccactcccagaagaggaaaaggagggcagcgacctgag |
| | accagtggtcatcgatgggagcaacgtggccatgagccatgggaacaaggaggtcttctcctgccggggcatcctg |
| | ctggcagtgaactggtttctggagcggggccacacagacatcacagtgtttgtgccatcctggaggaaggagcagcc |
| | tcggcccgacgtgcccatcacagaccagcacatcctgcgggaactggagaagaagaagatcctggtgttcacacca |
| | tcacgacgcgtgggggcaagcgggtggtgtgctatgacgacagattcattgtgaagctggcctacgagtctgacgg |
| | gatcgtggtttccaacgacacataccgtgacctccaaggcgagcggcaggagtggaagcgcttcatcgaggagcgg |
| | ctgctcatgtactccttcgtcaatgacaagtttatgccccctgatgacccactgggccggcacgggcccagcctggac |
| | aacttcctgcgtaagaagccactcactttggag (SEQ ID NO: 616) |
| WPRE | Aatcaacctctggattacaaaatttgtgaaagattgactggtattcttaactatgttgctccttttacgctatgtggatacgc |
| | tgctttaatgcctttgtatcatgctattgcttcccgtatggctttcattttctcctccttgtataaatcctggttgctgtctctttat |
| | gaggagttgtggcccgttgtcaggcaacgtggcgtggtgtgcactgtgtttgctgacgcaacccccactggttggggc |
| | attgccaccacctgtcagctcctttccgggactttcgctttccccctccctattgccacggcggaactcatcgccgcctg |
| | ccttgcccgctgctggacaggggctcggctgttgggcactgacaattccgtggtgttgtcggggaaatcatcgtccttt |
| | ccttggctgctcgcctAtgttgccacctggattctgcgcgggacgtccttctgctacgtcccttcggccctcaatccagc |
| | ggaccttccttcccgcggcctgctgccggctctgcggcctcttccgcgtcttcgccttcgccctcagacgagtcggatc |
| | tccctttgggccgcctccccgc (SEQ ID NO: 617) |
| SV40 | AACTTGTTTATTGCAGCTTATAATGGTTACAAATAAAGCAATAGCATCA |
| poly A | CAAATTTCACAAATAAAGCATTTTTTTCACTGCATTCTAGTTGTGGTTT |
| | GTCCAAACTCATCAATGTATCTTA (SEQ ID NO: 533) |
| 3′ ITR | AGGAACCCCTAGTGATGGAGTTGGCCACTCCCTCTCTGCGCGCTCGCTC |
| | GCTCACTGAGGCCGGGCGACCAAAGGTCGCCCGACGCCCGGGCTTTGC |
| | CCGGGCGGCCTCAGTGAGCGAGCGAGCGCGCAGCTGCCTGCAGG (SEQ |
| | ID NO: 598) |

[0629] In some embodiments, an AAV vector comprising a nucleic acid encoding a CAG-repeat targeting PUF comprises from 5′ to 3′: a sequence encoding a 5′ ITR (a first ITR), a sequence encoding an EFS/UBB promoter, a sequence encoding a kozak sequence, a sequence encoding an 8PUF protein, a sequence encoding a linker, a sequence encoding a myc tag, a sequence encoding a WPRE element, a sequence encoding an SV40 polyA sequence, and a 3′ ITR (a second ITR). In some embodiments, the CAG-targeting Cas13d composition is arranged as depicted in Table Q. In some embodiments, the vector set forth in Table Q is referred to as A01684. In some embodiments, vector A01684 is suitable for blocking.

TABLE Q
Vector A01684 encoding a CAG-repeat targeting PUF for blocking

| | |
|---|---|
| 5′ ITR | CCTGCAGGCAGCTGCGCGCTCGCTCGCTCACTGAGGCCGCCCGGGCGT |
| | CGGGCGACCTTTGGTCGCCCGGCCTCAGTGAGCGAGCGAGCGCGCAGA |
| | GAGGGAGTGGCCAACTCCATCACTAGGGGTTCCT (SEQ ID NO: 597) |
| EFS/UBB | GGGCAGAGCGCACATCGCCCACAGTCCCCGAGAAGTTGGGGGGAGGGGTCGG |
| Promoter | CAATTGAaCCGGTGCCTAGAGAAGGTGGCGCGGGGTAAACTGGGAAAGTGAT |
| | GTCGTGTACTGGCTCCGCCTTTTTCCCGAGGGTGGGGGAGAACCGTATATAAG |
| | TGCAGTAGTCGCCGTGAACGTTCTTTTTCGCAACGGGTTTGCCGCCAGAACAC |
| | AGaattccagGTAAGTCCCGCAGCCGTAACGACCTTGGGGGGGTGTGAGATTCTCA |
| | TTCTAATTTTGAAGAATATTAGGTGTAAAAGCAAGAAATACAATGATCCTGAG |
| | GTGACACGCTTATGTTTTACTTTTAAACTAG (SEQ ID NO: 613) |
| Kozak | Gccgccaccatg (SEQ ID NO: 529) |
| Sequence | |
| 8PUF | gGCCGCAGCCGCCTTTTGGAAGATTTTCGAAACAACCGGTACCCCAATT |
| | TACAACTGCGGGAGATTGCCGGACATATAATGGAATTTTCCCAAGACC |
| | AGCATGGGTCCAGATTCATTCGCCTGAAACTGGAGCGTGCCACACCAG |
| | CTGAGCGCCAGCTTGTCTTCAATGAAATCCTCCAGGCTGCCTACCAACT |
| | CATGGTGGATGTGTTTGGTAGTTACGTCATTGAAAAGTTCTTTGAATTT |
| | GGCAGTCTTGAACAGAAGCTGGCTTTGGCAGAACGGATTCGAGGTCAC |
| | GTCCTGTCATTGGCACTACAGATGTATGGCTGTCGTGTTATCCAGAAAG |
| | CTCTTGAGTTTATTCCTTCAGACCAGCAGAATGAGATGGTTCGGGAACT |
| | AGATGGCCATGTCTTGAAGTGTGTGAAAGATCAGAATGGCAGTTACGT |
| | GGTTCGCAAATGCATTGAATGTGTACAGCCCCAGTCTTTGCAATTTATC |
| | ATCGATGCGTTTAAGGGACAGGTATTTGCCTTATCCACACATCCTTATG |
| | GCTCCCGAGTGATTGAGAGAATCCTGGAGCACTGTCTCCCTGACCAGA |
| | CACTCCCTATTTTAGAGGAGCTTCACCAGCACACAGAGCAGCTTGTAC |
| | AGGATCAATATGGATGTTATGTAATCCAGCATGTACTGGAGCACGGTC |
| | GTCCTGAGGATAAAAGCAAAATTGTAGCAGAAATCCGAGGCAATGTAC |
| | TTGTATTGAGTCAGCACAAATTTGCAAGCTATGTTGTGCGCAAGTGTGT |
| | TACTCACGCCTCACGTACGGAGCGCGCTGTGCTCATCGATGAGGTGTG |
| | CACCATGAACGACGGTCCCCACAGTGCCTTATACACCATGATGAAGGA |
| | CCAGTATGCCAGCTACGTGGTCGAGAAGATGATTGACGTGGCGGAGCC |
| | AGGCCAGCGGAAGATCGTCATGCATAAGATCCGACCCCACATCGCAAC |
| | TCTTCGTAAGTACACCTATGGCAAGCACATTCTGGCCAAGCTGGAGAA |
| | GTACTACATGAAGAACGGTGTTGACTTAGGC (SEQ ID NO: 619) |
| Linker | GGCGGAAGT (SEQ ID NO: 618) |
| Myc tag | GAGCAAAAACTGATTAGTGAAGAAGATCTC (SEQ ID NO: 620) |
| WPRE | Aatcaacctctggattacaaaatttgtgaaagattgactggtattcttaactatgttgctccttttacgctatgtggatacgc |
| | tgctttaatgcctttgtatcatgctattgcttcccgtatggctttcattttctcctccttgtataaatcctggttgctgtctctttat |
| | gaggagttgtggcccgttgtcaggcaacgtggcgtggtgtgcactgtgtttgctgacgcaacccccactggttggggc |
| | attgccaccacctgtcagctcctttccgggactttcgctttccccctccctattgccacggcggaactcatcgccgcctg |
| | ccttgcccgctgctggacaggggctcggctgttgggcactgacaattccgtggtgttgtcggggaaatcatcgtccttt |
| | ccttggctgctcgcctAtgttgccacctggattctgcgcgggacgtccttctgctacgtcccttcggccctcaatccagc |
| | ggaccttccttcccgcggcctgctgccggctctgcggcctcttccgcgtcttcgccttcgccctcagacgagtcggatc |
| | tccctttgggccgcctccccgc (SEQ ID NO: 617) |
| SV40 | AACTTGTTTATTGCAGCTTATAATGGTTACAAATAAAGCAATAGCATCA |
| poly A | CAAATTTCACAAATAAAGCATTTTTTTCACTGCATTCTAGTTGTGGTTT |
| | GTCCAAACTCATCAATGTATCTTA (SEQ ID NO: 533) |
| 3′ ITR | AGGAACCCCTAGTGATGGAGTTGGCCACTCCCTCTCTGCGCGCTCGCTC |
| | GCTCACTGAGGCCGGGCGACCAAAGGTCGCCCGACGCCCGGGCTTTGC |
| | CCGGGCGGCCTCAGTGAGCGAGCGAGCGCGCAGCTGCCTGCAGG (SEQ |
| | ID NO: 598) |

[0630] In some embodiments, an AAV vector comprising a nucleic acid encoding a CAG-repeat targeting PUF comprises from 5′ to 3′: a sequence encoding a 5′ ITR (a first ITR), a sequence encoding an EFS/UBB promoter, a sequence encoding a kozak sequence, a sequence encoding an 8PUF protein, a sequence encoding a WPRE element, a sequence encoding an SV40 polyA sequence, and a 3′ ITR (a second ITR). In some embodiments, the CAG-targeting Cas13d composition is arranged as depicted in Table R. In some embodiments, the vector set forth in Table R is referred to as A01683.

TABLE R
Vector A01683 encoding a CAG-repeat targeting PUF for blocking

| Plasmid | |
|---|---|
| Element | DNA Sequence |
| 5′ ITR | CCTGCAGGCAGCTGCGCGCTCGCTCGCTCACTGAGGCCGCCCGGGCGT |
| | CGGGCGACCTTTGGTCGCCCGGCCTCAGTGAGCGAGCGAGCGCGCAGA |
| | GAGGGAGTGGCCAACTCCATCACTAGGGGTTCCT (SEQ ID NO: 597) |
| EFS/UBB | GGGCAGAGCGCACATCGCCCACAGTCCCCGAGAAGTTGGGGGGAGGGGTCGG |
| Promoter | CAATTGAaCCGGTGCCTAGAGAAGGTGGCGCGGGGTAAACTGGGAAAGTGAT |
| | GTCGTGTACTGGCTCCGCCTTTTTCCCGAGGGTGGGGGAGAACCGTATATAAG |
| | TGCAGTAGTCGCCGTGAACGTTCTTTTTCGCAACGGGTTTGCCGCCAGAACAC |
| | AGaattccagGTAAGTCCCGCAGCCGTAACGACCTTGGGGGGGTGTGAGATTCTCA |
| | TTCTAATTTTGAAGAATATTAGGTGTAAAAGCAAGAAATACAATGATCCTGAG |
| | GTGACACGCTTATGTTTTACTTTTAAACTAG (SEQ ID NO: 613) |
| Kozak | Gccgccaccatg (SEQ ID NO: 529) |
| Sequence | |
| 8PUF | gGCCGCAGCCGCCTTTTGGAAGATTTTCGAAACAACCGGTACCCCAATT |
| | TACAACTGCGGGAGATTGCCGGACATATAATGGAATTTTCCCAAGACC |
| | AGCATGGGTCCAGATTCATTCGCCTGAAACTGGAGCGTGCCACACCAG |
| | CTGAGCGCCAGCTTGTCTTCAATGAAATCCTCCAGGCTGCCTACCAACT |
| | CATGGTGGATGTGTTTGGTAGTTACGTCATTGAAAAGTTCTTTGAATTT |
| | GGCAGTCTTGAACAGAAGCTGGCTTTGGCAGAACGGATTCGAGGTCAC |
| | GTCCTGTCATTGGCACTACAGATGTATGGCTGTCGTGTTATCCAGAAAG |
| | CTCTTGAGTTTATTCCTTCAGACCAGCAGAATGAGATGGTTCGGGAACT |
| | AGATGGCCATGTCTTGAAGTGTGTGAAAGATCAGAATGGCAGTTACGT |
| | GGTTCGCAAATGCATTGAATGTGTACAGCCCCAGTCTTTGCAATTTATC |
| | ATCGATGCGTTTAAGGGACAGGTATTTGCCTTATCCACACATCCTTATG |
| | GCTCCCGAGTGATTGAGAGAATCCTGGAGCACTGTCTCCCTGACCAGA |
| | CACTCCCTATTTTAGAGGAGCTTCACCAGCACACAGAGCAGCTTGTAC |
| | AGGATCAATATGGATGTTATGTAATCCAGCATGTACTGGAGCACGGTC |
| | GTCCTGAGGATAAAAGCAAAATTGTAGCAGAAATCCGAGGCAATGTAC |
| | TTGTATTGAGTCAGCACAAATTTGCAAGCTATGTTGTGCGCAAGTGTGT |
| | TACTCACGCCTCACGTACGGAGCGCGCTGTGCTCATCGATGAGGTGTG |
| | CACCATGAACGACGGTCCCCACAGTGCCTTATACACCATGATGAAGGA |
| | CCAGTATGCCAGCTACGTGGTCGAGAAGATGATTGACGTGGCGGAGCC |
| | AGGCCAGCGGAAGATCGTCATGCATAAGATCCGACCCCACATCGCAAC |
| | TCTTCGTAAGTACACCTATGGCAAGCACATTCTGGCCAAGCTGGAGAA |
| | GTACTACATGAAGAACGGTGTTGACTTAGGC (SEQ ID NO: 621) |
| WPRE | Aatcaacctctggattacaaaatttgtgaaagattgactggtattcttaactatgttgctccttttacgctatgtggatacgc |
| | tgctttaatgcctttgtatcatgctattgcttcccgtatggctttcattttctcctccttgtataaatcctggttgctgtctctttat |
| | gaggagttgtggcccgttgtcaggcaacgtggcgtggtgtgcactgtgtttgctgacgcaacccccactggttggggc |
| | attgccaccacctgtcagctcctttccgggactttcgctttccccctccctattgccacggcggaactcatcgccgcctg |
| | ccttgcccgctgctggacaggggctcggctgttgggcactgacaattccgtggtgttgtcggggaaatcatcgtccttt |
| | ccttggctgctcgcctAtgttgccacctggattctgcgcgggacgtccttctgctacgtcccttcggccctcaatccagc |
| | ggaccttccttcccgcggcctgctgccggctctgcggcctcttccgcgtcttcgccttcgccctcagacgagtcggatc |
| | tccctttgggccgcctccccgc (SEQ ID NO: 617) |
| SV40 | AACTTGTTTATTGCAGCTTATAATGGTTACAAATAAAGCAATAGCATCA |
| poly A | CAAATTTCACAAATAAAGCATTTTTTTCACTGCATTCTAGTTGTGGTTT |
| | GTCCAAACTCATCAATGTATCTTA (SEQ ID NO: 533) |
| 3′ ITR | AGGAACCCCTAGTGATGGAGTTGGCCACTCCCTCTCTGCGCGCTCGCTC |
| | GCTCACTGAGGCCGGGCGACCAAAGGTCGCCCGACGCCCGGGCTTTGC |
| | CCGGGCGGCCTCAGTGAGCGAGCGAGCGCGCAGCTGCCTGCAGG (SEQ |
| | ID NO: 598) |

[0631] In some embodiments, an AAV vector comprising a nucleic acid encoding a CAG-repeat targeting PUF comprises from 5′ to 3′: a sequence encoding a 5′ ITR (a first ITR), a sequence encoding an EFS/UBB promoter, a sequence encoding a kozak sequence, a sequence encoding an 8PUF protein, a linker sequence, a PIN endonuclease, a linker sequence, a myc tag, a sequence encoding a WPRE element, a sequence encoding an SV40 polyA sequence, and a 3′ ITR (a second ITR). In some embodiments, the CAG-targeting Cas13d composition is arranged as depicted in Table S1 and S2. A nucleic acid sequence encoding Vector A02249 comprises SEQ ID NO: 624. A nucleic acid sequence encoding Vector A02250 comprises SEQ ID NO: 625.

TABLE S1
Vector A02250 encoding a CAG-repeat targeting PUF fused to a PIN
endonuclease

| Plasmid | |
|---|---|
| Element | DNA Sequence |
| 5′ ITR | CCTGCAGGCAGCTGCGCGCTCGCTCGCTCACTGAGGCCGCCCGG |
| | GCGTCGGGCGACCTTTGGTCGCCCGGCCTCAGTGAGCGAGCGAG |
| | CGCGCAGAGAGGGAGTGGCCAACTCCATCACTAGGGGTTCCT |
| | (SEQ ID NO: 597) |
| EFS/UBB | GGGCAGAGCGCACATCGCCCACAGTCCCCGAGAAGTTGGGGGGAGGG |
| Promoter | GTCGGCAATTGAaCCGGTGCCTAGAGAAGGTGGCGCGGGGTAAACTG |
| | GGAAAGTGATGTCGTGTACTGGCTCCGCCTTTTTCCCGAGGGTGGGGG |
| | AGAACCGTATATAAGTGCAGTAGTCGCCGTGAACGTTCTTTTTCGCAA |
| | CGGGTTTGCCGCCAGAACACAGaattccagGTAAGTCCCGCAGCCGTAACG |
| | ACCTTGGGGGGGTGTGAGATTCTCATTCTAATTTTGAAGAATATTAGG |
| | TGTAAAAGCAAGAAATACAATGATCCTGAGGTGACACGCTTATGTTTT |
| | ACTTTTAAACTAGGT (SEQ ID NO: 613) |
| Kozak | Gccgccaccatg (SEQ ID NO: 529) |
| Sequence | |
| 8PUF | gGCCGCAGCCGCCTTTTGGAAGATTTTCGAAACAACCGGTACCC |
| | CAATTTACAACTGCGGGAGATTGCCGGACATATAATGGAATTTT |
| | CCCAAGACCAGCATGGGTCCAGATTCATTCGCCTGAAACTGGAG |
| | CGTGCCACACCAGCTGAGCGCCAGCTTGTCTTCAATGAAATCCT |
| | CCAGGCTGCCTACCAACTCATGGTGGATGTGTTTGGTAGTTACG |
| | TCATTGAAAAGTTCTTTGAATTTGGCAGTCTTGAACAGAAGCTG |
| | GCTTTGGCAGAACGGATTCGAGGTCACGTCCTGTCATTGGCACT |
| | ACAGATGTATGGCTGTCGTGTTATCCAGAAAGCTCTTGAGTTTA |
| | TTCCTTCAGACCAGCAGAATGAGATGGTTCGGGAACTAGATGGC |
| | CATGTCTTGAAGTGTGTGAAAGATCAGAATGGCAGTTACGTGGT |
| | TCGCAAATGCATTGAATGTGTACAGCCCCAGTCTTTGCAATTTA |
| | TCATCGATGCGTTTAAGGGACAGGTATTTGCCTTATCCACACAT |
| | CCTTATGGCTCCCGAGTGATTGAGAGAATCCTGGAGCACTGTCT |
| | CCCTGACCAGACACTCCCTATTTTAGAGGAGCTTCACCAGCACA |
| | CAGAGCAGCTTGTACAGGATCAATATGGATGTTATGTAATCCAG |
| | CATGTACTGGAGCACGGTCGTCCTGAGGATAAAAGCAAAATTGT |
| | AGCAGAAATCCGAGGCAATGTACTTGTATTGAGTCAGCACAAAT |
| | TTGCAAGCTATGTTGTGCGCAAGTGTGTTACTCACGCCTCACGT |
| | ACGGAGCGCGCTGTGCTCATCGATGAGGTGTGCACCATGAACG |
| | ACGGTCCCCACAGTGCCTTATACACCATGATGAAGGACCAGTAT |
| | GCCAGCTACGTGGTCGAGAAGATGATTGACGTGGCGGAGCCAG |
| | GCCAGCGGAAGATCGTCATGCATAAGATCCGACCCCACATCGC |
| | AACTCTTCGTAAGTACACCTATGGCAAGCACATTCTGGCCAAGC |
| | TGGAGAAGTACTACATGAAGAACGGTGTTGACTTAGGC(SEQ ID |
| | NO: 614) |
| Linker | GTGGATACTGCCAATGGCAGC (SEQ ID NO: 615) |
| PIN | CAGATGGAGCTCGAAATCAGGCCGCTGTTCCTCGTGCCGGACAC |
| | TAATGGTTTTATAGATCACTTGGCGTCCTTGGCTAGACTTCTGGA |
| | AAGCCGAAAGTATATATTGGTAGTGCCGTTGATTGTAATTAACG |
| | AATTGGATGGGTTGGCGAAAGGACAAGAGACTGATCACAGAGC |
| | AGGAGGCTACGCGAGGGTCGTCCAAGAGAAGGCGCGAAAAAGC |
| | ATCGAGTTCCTGGAGCAGCGATTTGAGAGCAGGGACTCATGCCT |
| | GAGAGCCCTCACGTCCCGGGGGAACGAGCTGGAGTCCATCGCTT |
| | TCCGAAGTGAAGACATTACGGGCCAACTTGGGAATAATGATGA |
| | CCTCATCTTGTCCTGCTGCCTGCACTACTGCAAGGACAAGGCTA |
| | AGGACTTCATGCCTGCCTCCAAGGAGGAGCCTATCCGATTGTTG |
| | AGGGAAGTAGTACTTTTGACGGACGACCGCAACCTCCGGGTAA |
| | AGGCGCTGACTCGAAATGTCCCAGTAAGGGATATACCGGCGTTC |
| | CTTACATGGGCTCAAGTAGGG (SEQ ID NO: 623) |
| Linker | GGCGGAtct |
| Myc tag | GAGCAgAAACTGATTAGcGAAGAgGATCTC (SEQ ID NO: 610) |
| WPRE | Aatcaacctctggattacaaaatttgtgaaagattgactggtattcttaactatgttgctccttttacgctatgtg |
| | gatacgctgctttaatgcctttgtatcatgctattgcttcccgtatggctttcattttctcctccttgtataaatcctg |
| | gttgctgtctctttatgaggagttgtggcccgttgtcaggcaacgtggcgtggtgtgcactgtgtttgctgacg |
| | caacccccactggttggggcattgccaccacctgtcagctcctttccgggactttcgetttccccctccctatt |
| | gccacggcggaactcatcgccgcctgccttgcccgctgctggacaggggctcggctgttgggcactgac |
| | aattccgtggtgttgtcggggaaatcatcgtcctttccttggctgctcgcctAtgttgccacctggattctgcg |
| | cgggacgtccttctgctacgtcccttcggccctcaatccagcggaccttccttcccgcggcctgctgccgg |
| | ctctgcggcctcttccgcgtcttcgccttcgccctcagacgagtcggatctccctttgggccgcctccccgc |
| | (SEQ ID NO: 617) |
| SV40 poly A | AACTTGTTTATTGCAGCTTATAATGGTTACAAATAAAGCAATAG |
| | CATCACAAATTTCACAAATAAAGCATTTTTTTCACTGCATTCTAG |
| | TTGTGGTTTGTCCAAACTCATCAATGTATCTTA (SEQ ID NO: 533) |
| 3′ ITR | AGGAACCCCTAGTGATGGAGTTGGCCACTCCCTCTCTGCGCGCT |
| | CGCTCGCTCACTGAGGCCGGGCGACCAAAGGTCGCCCGACGCC |
| | CGGGCTTTGCCCGGGCGGCCTCAGTGAGCGAGCGAGCGCGCAG |
| | CTGCCTGCAGG (SEQ ID NO: 598) |

TABLE S2
CAG-repeat targeting PUF fused
to a PIN endonuclease

| | | | | Amino |
|---|---|---|---|---|
| | Pro- | | | Acid |
| | tein | | Target | Sequence |
| Construct | Type | Elements | Sequence | of PUF |
| A02250 | 8PUF | N-terminal | GCAGCAGC | PUF |
| | | PUF; linker | (SEQ | SEQ |
| | | between PUF | ID | ID |
| | | and PIN | NO: | NO: |
| | | endonuclease | 476 | 549 |
| | | (VDTANGS); | | |
| | | C-terminal | | |
| | | PIN | | |
| | | Myc tag | | |

[0632] In some embodiments, an AAV vector comprising a nucleic acid encoding a CAG-repeat targeting PUF comprises from 5′ to 3′: a sequence encoding a 5′ ITR (a first ITR), a sequence encoding an EFS/UBB promoter, a sequence encoding a kozak sequence, a sequence encoding an 8PUF protein, a linker sequence, a PIN endonuclease, a sequence encoding a WPRE element, a sequence encoding a polyA sequence, and a 3′ ITR (a second ITR). In some embodiments, the CAG-targeting Cas13d composition is arranged as depicted in Table S3 and S4.

TABLE S3
Vector A02249 encoding a CAG-repeat
targeting PUF fused to a PIN
endonuclease

| Plasmid | |
|---|---|
| Element | DNA Sequence |
| 5′ ITR | CCTGCAGGCAGCTGCGCGCTCGCTC |
| | GCTCACTGAGGCCGCCCGGGCGTCG |
| | GGCGACCTTTGGTCGCCCGGCCTCA |
| | GTGAGCGAGCGAGCGCGCAGAGAGG |
| | GAGTGGCCAACTCCATCACTAGGGG |
| | TTCCT |
| | (SEQ ID NO: 597) |
| EFS/UBB | GGGCAGAGCGCACATCGCCCACAGT |
| Promoter | CCCCGAGAAGTTGGGGGGAGGGGTC |
| | GGCAATTGAaCCGGTGCCTAGAGAA |
| | GGTGGCGCGGGGTAAACTGGGAAAG |
| | TGATGTCGTGTACTGGCTCCGCCTT |
| | TTTCCCGAGGGTGGGGGAGAACCGT |
| | ATATAAGTGCAGTAGTCGCCGTGAA |
| | CGTTCTTTTTCGCAACGGGTTTGCC |
| | GCCAGAACACAGaattccagGTAAG |
| | TCCCGCAGCCGTAACGACCTTGGGG |
| | GGGTGTGAGATTCTCATTCTAATTT |
| | TGAAGAATATTAGGTGTAAAAGCAA |
| | GAAATACAATGATCCTGAGGTGACA |
| | CGCTTATGTTTTACTTTTAAACTAG |
| | GT |
| | (SEQ ID NO: 613) |
| Kozak | Gccgccaccatg |
| Sequence | (SEQ ID NO: 529) |
| 8PUF | gGCCGCAGCCGCCTTTTGGAAGATT |
| | TTCGAAACAACCGGTACCCCAATTT |
| | ACAACTGCGGGAGATTGCCGGACAT |
| | ATAATGGAATTTTCCCAAGACCAGC |
| | ATGGGTCCAGATTCATTCGCCTGAA |
| | ACTGGAGCGTGCCACACCAGCTGAG |
| | CGCCAGCTTGTCTTCAATGAAATCC |
| | TCCAGGCTGCCTACCAACTCATGGT |
| | GGATGTGTTTGGTAGTTACGTCATT |
| | GAAAAGTTCTTTGAATTTGGCAGTC |
| | TTGAACAGAAGCTGGCTTTGGCAGA |
| | ACGGATTCGAGGTCACGTCCTGTCA |
| | TTGGCACTACAGATGTATGGCTGTC |
| | GTGTTATCCAGAAAGCTCTTGAGTT |
| | TATTCCTTCAGACCAGCAGAATGAG |
| | ATGGTTCGGGAACTAGATGGCCATG |
| | TCTTGAAGTGTGTGAAAGATCAGAA |
| | TGGCAGTTACGTGGTTCGCAAATGC |
| | ATTGAATGTGTACAGCCCCAGTCTT |
| | TGCAATTTATCATCGATGCGTTTAA |
| | GGGACAGGTATTTGCCTTATCCACA |
| | CATCCTTATGGCTCCCGAGTGATTG |
| | AGAGAATCCTGGAGCACTGTCTCCC |
| | TGACCAGACACTCCCTATTTTAGAG |
| | GAGCTTCACCAGCACACAGAGCAGC |
| | TTGTACAGGATCAATATGGATGTTA |
| | TGTAATCCAGCATGTACTGGAGCAC |
| | GGTCGTCCTGAGGATAAAAGCAAAA |
| | TTGTAGCAGAAATCCGAGGCAATGT |
| | ACTTGTATTGAGTCAGCACAAATTT |
| | GCAAGCTATGTTGTGCGCAAGTGTG |
| | TTACTCACGCCTCACGTACGGAGCG |
| | CGCTGTGCTCATCGATGAGGTGTGC |
| | ACCATGAACGACGGTCCCCACAGTG |
| | CCTTATACACCATGATGAAGGACCA |
| | GTATGCCAGCTACGTGGTCGAGAAG |
| | ATGATTGACGTGGCGGAGCCAGGCC |
| | AGCGGAAGATCGTCATGCATAAGAT |
| | CCGACCCCACATCGCAACTCTTCGT |
| | AAGTACACCTATGGCAAGCACATTC |
| | TGGCCAAGCTGGAGAAGTACTACAT |
| | GAAGAACGGTGTTGACTTAGGC |
| | (SEQ ID NO: 614) |
| Linker | GTGGATACTGCCAATGGCAGC |
| | (SEQ ID NO: 615) |
| PIN | CAGATGGAGCTCGAAATCAGGCCGC |
| | TGTTCCTCGTGCCGGACACTAATGG |
| | TTTTATAGATCACTTGGCGTCCTTG |
| | GCTAGACTTCTGGAAAGCCGAAAGT |
| | ATATATTGGTAGTGCCGTTGATTGT |
| | AATTAACGAATTGGATGGGTTGGCG |
| | AAAGGACAAGAGACTGATCACAGAG |
| | CAGGAGGCTACGCGAGGGTCGTCCA |
| | AGAGAAGGCGCGAAAAAGCATCGAG |
| | TTCCTGGAGCAGCGATTTGAGAGCA |
| | GGGACTCATGCCTGAGAGCCCTCAC |
| | GTCCCGGGGGAACGAGCTGGAGTCC |
| | ATCGCTTTCCGAAGTGAAGACATTA |
| | CGGGCCAACTTGGGAATAATGATGA |
| | CCTCATCTTGTCCTGCTGCCTGCAC |
| | TACTGCAAGGACAAGGCTAAGGACT |
| | TCATGCCTGCCTCCAAGGAGGAGCC |
| | TATCCGATTGTTGAGGGAAGTAGTA |
| | CTTTTGACGGACGACCGCAACCTCC |
| | GGGTAAAGGCGCTGACTCGAAATGT |
| | CCCAGTAAGGGATATACCGGCGTTC |
| | CTTACATGGGCTCAAGTAGGG |
| | (SEQ ID NO: 623) |
| WPRE | aatcaacctctggattacaaaattt |
| | gtgaaagattgactggtattcttaa |
| | ctatgttgctccttttacgctatgt |
| | ggatacgctgctttaatgcctttgt |
| | atcatgctattgcttcccgtatggc |
| | tttcattttctcctccttgtataaa |
| | tcctggttgctgtctctttatgagg |
| | agttgtggcccgttgtcaggcaacg |
| | tggcgtggtgtgcactgtgtttgct |
| | gacgcaacccccactggttggggca |
| | ttgccaccacctgtcagctcctttc |
| | cgggactttcgetttccccctccct |
| | attgccacggcggaactcatcgccg |
| | cctgccttgcccgctgctggacagg |
| | ggctcggctgttgggcactgacaat |
| | tccgtggtgttgtcggggaaatcat |
| | cgtcctttccttggctgctcgcctA |
| | tgttgccacctggattctgcgcggg |
| | acgtccttctgctacgtcccttcgg |
| | ccctcaatccagcggaccttccttc |
| | ccgcggcctgctgccggctctgcgg |
| | cctcttccgcgtcttcgcettegcc |
| | ctcagacgagtcggatctccctttg |
| | ggccgcctccccgc |
| | (SEQ ID NO: 617) |
| SV40 poly A | AACTTGTTTATTGCAGCTTATAATG |
| | GTTACAAATAAAGCAATAGCATCAC |
| | AAATTTCACAAATAAAGCATTTTTT |
| | TCACTGCATTCTAGTTGTGGTTTGT |
| | CCAAACTCATCAATGTATCTTA |
| | (SEQ ID NO: 533) |
| 3′ ITR | AGGAACCCCTAGTGATGGAGTTGGC |
| | CACTCCCTCTCTGCGCGCTCGCTCG |
| | CTCACTGAGGCCGGGCGACCAAAGG |
| | TCGCCCGACGCCCGGGCTTTGCCCG |
| | GGCGGCCTCAGTGAGCGAGCGAGCG |
| | CGCAGCTGCCTGCAGG |
| | (SEQ ID NO: 598) |

TABLE S4
CAG-repeat targeting PUF fused
to a PIN endonuclease

| | Pro- | | Target | Amino Acid |
|---|---|---|---|---|
| | tein | | Se- | Sequence |
| Construct | Type | Elements | quence | of PUF |
| A02249 | 8PUF | N-terminal | GCAGC | PUF |
| | | PUF; linker | AGC | SEQ ID |
| | | between PUF | | NO: 549 |
| | | and PIN | | |
| | | endonuclease | | |
| | | (VDTANGS); | | |
| | | C-terminal PIN | | |

[0633] In some embodiments, nucleic acid sequences encoding CAG-targeting Cas13d proteins of the disclosure are codon optimized nucleic acid sequences. In some embodiments, the codon optimized sequence encoding a CAG-targeting Cas13d protein exhibits at least 5%, at least 10%, at least 20%, at least 30%, at least 50%, at least 75%, at least 100%, at least 200%, at least 300%, at least 500%, or at least 1000% increased translation in a human subject relative to a wild-type or non-codon optimized nucleic acid sequence.

[0634] In some aspects, a codon optimized nucleic acid sequence encoding a CAG-targeting Cas13d protein such as those put forth in SEQ ID NOs: 518, 528, 534, 536, and 539 exhibits increased stability. In some aspects, a codon optimized nucleic acid sequence encoding a CAG-targeting Cas13d protein exhibits increased stability through increased resistance to hydrolysis. In some embodiments, the codon optimized sequence encoding a CAG-targeting Cas13d protein exhibits at least 5%, at least 10%, at least 20%, at least 30%, at least 50%, at least 75%, at least 100%, at least 200%, at least 300%, at least 500%, or at least 1000% increased stability relative to a wild-type or non-codon optimized nucleic acid sequence. In some embodiments, the codon optimized sequence encoding a CAG-targeting Cas13d protein exhibits at least 5%, at least 10%, at least 20%, at least 30%, at least 50%, at least 75%, at least 100%, at least 200%, at least 300%, at least 500%, or at least 1000% increased resistance to hydrolysis in a human subject relative to a wild-type or non-codon optimized nucleic acid sequence.

[0635] In some aspects, a codon optimized nucleic acid sequence encoding a CAG-targeting Cas13d protein such as those put forth in SEQ ID NOs: 518, 528, 534, 536, and 539, can comprise no donor splice sites. In some aspects, a codon optimized nucleic acid sequence encoding a CAG-targeting Cas13d protein can comprise no more than about one, or about two, or about three, or about four, or about five, or about six, or about seven, or about eight, or about nine, or about ten donor splice sites. In some aspects, a codon optimized nucleic acid sequence encoding a CAG-targeting Cas13d protein comprises at least one, or at least two, or at least three, or at least four, or at least five, or at least six, or at least seven, or at least eight, or at least nine, or at least ten fewer donor splice sites as compared to a non-codon optimized nucleic acid sequence encoding the CAG-targeting Cas13d protein.

[0636] Without wishing to be bound by theory, the removal of donor splice sites in the codon optimized nucleic acid sequence can unexpectedly and unpredictably increase expression of the CAG-targeting Cas13d protein in vivo, as cryptic splicing is prevented. Moreover, cryptic splicing may vary between different subjects, meaning that the expression level of the CAG-targeting Cas13d protein comprising donor splice sites may unpredictably vary between different subjects. Such unpredictability is unacceptable in the context of human therapy. Accordingly, the codon optimized nucleic acid sequences put forth in SEQ ID NOs: 518, 528, 534, 536, and 539, which lacks donor splice sites, unexpectedly and surprisingly allows for increased expression of the CAG-targeting Cas13d protein in human subjects and regularizes expression of the CAG-targeting Cas13d protein across different human subjects.

[0637] In some aspects, a codon optimized nucleic acid sequence encoding a CAG-targeting Cas13d protein, such as those put forth in SEQ ID NOs: 518, 528, 534, 536, and 539, can have a GC content that differs from the GC content of the non-codon optimized nucleic acid sequence encoding the CAG-targeting Cas13d protein. In some aspects, the GC content of a codon optimized nucleic acid sequence encoding a CAG-targeting Cas13d protein is more evenly distributed across the entire nucleic acid sequence, as compared to the non-codon optimized nucleic acid sequence encoding the CAG-targeting Cas13d protein.

[0638] Without wishing to be bound by theory, by more evenly distributing the GC content across the entire nucleic acid sequence, the codon optimized nucleic acid sequence exhibits a more uniform melting temperature (“Tm”) across the length of the transcript. The uniformity of melting temperature results unexpectedly in increased expression of the codon optimized nucleic acid in a human subject, as transcription and/or translation of the nucleic acid sequence occurs with less stalling of the polymerase and/or ribosome.

[0639] In some aspects, a codon optimized nucleic acid sequence encoding a CAG-targeting Cas13d protein, such as those put forth in SEQ ID NOs: 518, 528, 534, 536, and 539, can have fewer repressive microRNA target binding sites as compared to the non-codon optimized nucleic acid sequence encoding the CAG-targeting Cas13d protein. In some aspects, a codon optimized nucleic acid sequence encoding a CAG-targeting Cas13d protein can have at least one, or at least two, or at least three, or at least four, or at least five, or at least six, or at least seven, or at least eight, or at least nine, or at least ten, or at least ten fewer repressive microRNA target binding sites as compared to the non-codon optimized nucleic acid sequence the CAG-targeting Cas13d protein.

[0640] Without wishing to be bound by theory, by having fewer repressive microRNA target binding sites, the codon optimized nucleic acid sequence encoding a CAG-targeting Cas13d protein unexpectedly exhibits increased expression in a human subject.

### Fusion Proteins

[0641] In some embodiments of the compositions and methods of the disclosure, the composition comprises a sequence encoding a target RNA-binding fusion protein comprising (a) a sequence encoding a first RNA-binding polypeptide or portion thereof; and optionally (b) a sequence encoding a second RNA-binding polypeptide, wherein the first RNA-binding polypeptide binds a target RNA, and wherein the second RNA-binding polypeptide comprises RNA-nuclease activity.

[0642] In some embodiments, a target RNA-binding fusion protein is an RNA-guided target RNA-binding fusion protein. RNA-guided target RNA-binding fusion proteins comprise at least one RNA-binding polypeptide which corresponds to a gRNA which guides the RNA-binding polypeptide to target RNA. RNA-guided target RNA-binding fusion proteins include without limitation, RNA-binding polypeptides which are CRISPR/Cas-based RNA-binding polypeptides or portions thereof.

### Signal Sequences

[0643] In some embodiments, a target RNA-binding fusion protein of the disclosure comprises a signal sequence. In some embodiments, a target RNA-binding fusion protein comprises one or more signal sequences. In some embodiments, the signal sequence(s) is a nuclear localization sequence (NLS), nuclear export signal (NES) or a combination thereof. In some embodiments, the tag sequence comprises a nuclear localization sequence (NLS). In some embodiments, the NLS sequence comprises a sequence listed in table 8. In some embodiments, the NLS signal sequence is a human NLS. In some embodiments, the human NLS signal sequence is a human pRB-NLS or a human pRB-NLS (extended version).

TABLE 8
Nuclear Localization Sequences
of the disclosure

| | | SEQ |
|---|---|---|
| | Amino acid | ID |
| Name | Sequence | NO: |
| SV40-NLS | PKKKRKV | 437 |
| human H2B-NLS | GKKRKRSRK | 438 |
| yeast H2B-NLS | GKKRSKV | 439 |
| human p53-NLS | KRALPNNTSSSPQPKKKP | 440 |
| human-cmyc-NLS | PAAKRVKLD | 441 |
| human pRB-NLS | KRSAEGSNPPKPLKKLR | 442 |
| human Nucleoplasmin- | KRPAATKKAGQAKKKK | 443 |
| NLS | LDK | |
| Human pRB-NLS | DRVLKRSAEGSNPPKP | 543 |
| (extended version) | LKKLR | |

[0644] In some embodiments, the signal sequence comprises one or more NES sequences. In some embodiments, the one or more NES sequence comprises a sequence listed in Table 9.

TABLE 9
Nuclear Export Sequences of the disclosure

| | | SEQ |
|---|---|---|
| | Amino acid | ID |
| Name | Sequence | NO: |
| HIV REV NES | LPPLERLTLD | 544 |
| Human PKI NES | LALKLAGLDI | 545 |

[0645] In some embodiments, a target RNA-binding fusion protein of the disclosure comprises a tag sequence. In some embodiments, the tag sequence is a FLAG tag.

[0646] In some embodiments, the FLAG tag sequence is DYKDDDDK (SEQ ID NO: 436).

[0647] Linker Sequences

[0648] In some embodiments, a target RNA-binding fusion protein comprises a linker sequence. In some embodiments, the linker sequence may comprise or consist of 1, 2, 3, 4, 5, 6, 7, 8, 9, 10, 15, 20, 25, 30, 35, 40, 45, 50 or any number of amino acids in between. In some embodiments, the linker sequence comprises a linker sequence listed in Table 10.

TABLE 10
Linker Sequences of the disclosure

| Linker Sequence (amino acid) | SEQ ID NO: |
|---|---|
| GGS | 410 |
| VDTANGS | 411 |
| VDTGNGS | 412 |
| SGSETPGTSESATPES | 413 |
| GGGGSGGGGS | 414 |
| GGGGGGGGSGGGGS | 415 |
| GGGGSGGGGSGGGGSGG | 416 |
| GGS | |
| EAAAKEAAAK | 417 |
| EAAAKEAAAKEAAAK | 418 |
| EAAAKEAAAKEAAAKEAA | 419 |
| AK | |
| APAPAPAP | 420 |
| APAPAPAPAPAP | 421 |
| APAPAPAPAPAPAPAPAP | 422 |
| GGGGSEAAAK | 423 |
| EAAAKGGGGS | 424 |
| GGGGSGGGGSEAAAKEAA | 425 |
| AK | |
| EAAAKEAAAKGGGGSGGG | 426 |
| GS | |
| RQTSPDPCPQLPLVPR | 427 |
| VDTGNWF | 428 |
| VDTANGSVDTGNGS | 429 |
| ARNVEERLCL | 430 |
| AIELNPSNA | 431 |
| ICGSRNL | 432 |
| VLATDMSKH | 434 |
| FLRELPEP | 435 |
| LIPKDQYYC | 436 |
| AEAAAKEAAAKA | 628 |
| AEAAAKEAAAKEAAAKA | 629 |
| AEAAAKEAAAKEAAAKEA | 630 |
| AAKA | |
| YVEFEGEQGVDEGGVSGG | 631 |
| GS | |
| GSRNLDFQALEETTEYDGG | 632 |
| Y | |
| ASSTSPVEISEWLDQKLTKS | 633 |
| DRPEL | |
| VNQCRRQSEDSTFYLG | 634 |
| AVSPLLLTTTNSSEGLSMG | 635 |
| NY | |
| LDEAYPGKKLLPDDPYEK | 636 |
| ACQ | |
| SAAAATPAVRTVPQYKYA | 637 |
| AGVRNPQQHLNAQPQVTM | |
| QQPAVHVQGQEPL | |
| GGGGSEAAAKGGGGS | 638 |
| GGGGSEAAAKGGGGSEAA | 639 |
| AKGGGGS | |
| GGGGSSGSETGGTSESATG | 640 |
| ESGGGGS | |
| SGSETPGTSESATPES | 641 |

[0649] Promoter Sequences

[0650] In aspects, CAG targeting compositions of the disclosure comprise a promoter sequence. In some embodiments, any promoter disclosed herein can be substituted for any of the other promoters recited in the RNA-targeting constructs disclosed herein. In some aspects, CAG targeting compositions comprise a truncated CAG (tCAG) promoter (SEQ ID NO: 385). In some aspects, CAG targeting compositions comprise a short EF1-alpha (EFS) promoter (SEQ ID NO: 520). In some aspects, CAG targeting compositions comprise an EFS-UBB promoter set forth in SEQ ID NO: 613. In some aspects, CAG targeting compositions comprise a human synapsin promoter set forth in SEQ ID NO: 627. In some embodiments, promoter sequences of the disclosure comprise a human EF1-alpha core promoter (SEQ ID NO: 642). In some embodiments, promoter sequences of the disclosure comprise a modified UBB intron (SEQ ID NO: 643). In some embodiments, promoter sequences of the disclosure comprise a modified CMV enhancer sequence (SEQ ID NO: 644). In some embodiments, promoter sequences of the disclosure comprise an eCMV-EFS-UBB promoter sequence (SEQ ID NO: 645).

[0651] In some embodiments, expression control by a promoter is constitutive or ubiquitous. Non-limiting exemplary promoters include a Pol III promoter such as, e.g., U6 and H1 promoters and/or a Pol II promoter e.g., SV40, CMV (optionally including the CMV enhancer), RSV (Rous Sarcoma Virus LTR promoter (optionally including RSV enhancer), CBA (hybrid CMV enhancer/chicken β-actin), CAG (hybrid CMV enhancer fused to chicken β-actin), truncated CAG, Cbh (hybrid CBA), EF-1a (human elongation factor alpha-1) or EFS (short intron-less EF-1 alpha), PGK (phosphoglycerol kinase), CEF (chicken embryo fibroblasts), UBC (ubiquitin C), GUSB (lysosomal enzyme beta-glucuronidase), UCOE (ubiquitous chromatin opening element), hAAT (alpha-1 antitrypsin), TBG (thyroxine binding globulin), Desmin (full-length or truncated), MCK (muscle creatine kinase), C5-12 (synthetic muscle promoter), CK8e (creatin kinase 8), NSE (neuron-specific enolase), Synapsin, Synapsin-1 (SYN-1), opsin, PDGF (platelet-derived growth factor), PDGF-A, MecP2 (methyl CpG-binding protein 2), CaMKII (Calcium/Calmodulin-dependent protein kinase II), mGluR2 (metabotropic glutamate receptor 2), NFL (neurofilament light), NFH (neurofilament heavy), nβ2, PPE (rat preproenkephalin), ENK (preproenkephalin), Preproenkephalin-neurofilament chimeric promoter, EAAT2 (glutamate transporter), GFAP (glial fibrillary acidic protein), MBP (myelin basic protein), human rhodopsin kinase promoter (hGRKi), β-actin promoter, dihydrofolate reductase promoter, MHCK7 (hybrid promoter of enhancer/promoter regions of muscle creatine kinase and alpha myosin heavy-chain genes) and combinations thereof. An “enhancer” is a region of DNA that can be bound by activating proteins to increase the likelihood or frequency of transcription. Non-limiting exemplary enhancers and posttranscriptional regulatory elements include the CMV enhancer, MCK enhancer, R-U5′ segment in LTR of HTLV-1, SV40 enhancer, the intron sequence between exons 2 and 3 of rabbit β-globin, and WPRE. In some embodiments an intron is used to enhance promoter activity such as a UBB intron. In some embodiments, the UBB intron is used with an EFS promoter. In some embodiments, enhancer sequences can be added in the 5′ or 3′ UTR. In some embodiments, a 5′ enhancer can be Hsp70 as set forth in SEQ ID NO: 657:

TABLE 11
8PUF protein according to SEQ ID NO: 444

| | RNA | | SEQ |
|---|---|---|---|
| PUF | Recogni- | | ID |
| Module | tion | Amino Acid Sequence | NO: |
| PUF R1′ | — | GRSRLLEDFRNNRYPNLQ | 495 |
| | | LREIAG | |
| PUF R1 | G | HIMEFSQDQHGSRFIELK | 498 |
| | | LERATPAERQLVFNEILQ | |
| PUF R2 | A | AAYQLMVDVFGCYVIQKF | 490 |
| | | FEFGSLEQKLALAERIRG | |
| PUF R3 | C | HVLSLALQMYGSYVIRKA | 508 |
| | | LEFIPSDQQNEMVRELDG | |
| PUF R4 | G | HVLKCVKDQNGSYVVEKC | 504 |
| | | IECVQPQSLQFIIDAFKG | |
| PUF R5 | A | QVFALSTHPYGCRVIQRI | 512 |
| | | LEHCLPDQTLPILEELHQ | |
| PUF R6 | C | HTEQLVQDQYGSYVIRHV | 502 |
| | | LEHGRPEDKSKIVAEIRG | |
| PUF R7 | G | NVLVLSQHKFASNVVEKC | 510 |
| | | VTHASRTERAVLIDEVCT | |
| | | MNDGPHS | |
| PUF R8 | A | ALYTMMKDQYACYVVQKM | 493 |
| | | IDVAEPGQRKIVMHKIRP | |
| PUF R8′ | — | HIATLRKYTYGKHILAKL | 496 |
| | | EKYYMKNGVDLG | |

[0652] Non-Guided RNA-Binding Fusion Proteins

[0653] In some embodiments, a target RNA-binding fusion protein is not an RNA-guided target RNA-binding fusion protein

and as such comprises at least one RNA-binding polypeptide which is capable of binding a target RNA without a corresponding gRNA sequence. Such non-guided RNA-binding polypeptides include, without limitation, at least one RNA-binding protein or RNA-binding portion thereof which is a PUF (Pumilio and FBF homology family) protein. This type RNA-binding polypeptide can be used instead of a gRNA-guided RNA binding protein such as CRISPR/Cas. The unique RNA recognition mode of PUF proteins (named for Drosophila pumilio and C. elegans fem-3 binding factor) that are involved in mediating mRNA stability and translation are well known in the art. The PUF domain of human Pumilio1, also known in the art, binds tightly to cognate RNA sequences and its specificity can be modified. It contains eight PUF modules that recognize eight consecutive RNA bases with each module recognizing a single base. Since two amino acid side chains in each module recognize the Watson-Crick edge of the corresponding base and determine the specificity of that module, a PUF protein can be designed to specifically bind most 8 to 16-nt RNA. Wang et al., Nat Methods. 2009; 6(11): 825-830. See also WO2012/068627 which is incorporated by reference herein in its entirety.

[0654] The modular nature of the PUF-RNA interaction has been used to rationally engineer the binding specificity of PUF domains (Cheong, C. G. & Hall, T. M. (2006) PNAS 103: 13635-13639; Wang, X. et al (2002) Cell 110: 501-512). However, only the successful design of PUF proteins with modules that recognize adenine, guanine or uracil have been reported prior to the teachings of WO2012/06827 supra. While the wild-type PumHD does not bind cytosine (C), molecular engineering has shown that some of the Pum units can be mutated to bind C with good yield and specificity. See e.g., Dong, S. et al. Specific and modular binding code for cytosine recognition in Pumilio/FBF (PUF) RNA-binding domains, The Journal of biological chemistry 286, 26732-26742 (2011). Accordingly, PumHD is a modified version of the WT Pumilio protein that exhibits programmable binding to arbitrary 8-base sequences of RNA. Each of the eight units of PumHD can bind to all four RNA bases, and the RNA bases flanking the target sequence do not affect binding. See also the following for art-recognized RNA-binding rules of PUF design: Filipovska A, Razif M F, Nyg\dot{a}rd K K, & Rackham O. A universal code for RNA recognition by PUF proteins. Nature chemical biology, 7(7), 425-427 (2011); Filipovska A, & Rackham O. Modular recognition of nucleic acids by PUF, TALE and PPR proteins. Molecular BioSystems, 8(3), 699-708 (2012); Abil Z, Denard C A, & Zhao H. Modular assembly of designer PUF proteins for specific post-transcriptional regulation of endogenous RNA. Journal of biological engineering, 8(1), 7 (2014); Zhao Y, Mao M, Zhang W, Wang J, Li H, Yang Y, Wang Z, & Wu J. Expanding RNA binding specificity and affinity of engineered PUF domains. Nucleic Acids Research, 46(9), 4771-4782 (2018); Shinoda K, Tsuji S. Futaki S, & Imanishi M, Nested PUF Proteins: Extending Target RNA Elements for Gene Regulation. ChemBioChem, 19(2), 171-176 (2018); Koh Y Y, Wang Y, Qiu C, Opperman L, Gross L, Tanaka Hall T M, & Wickens M. Stacking Interactions in PUF-RNA Complexes. RNA, 17(4), 718-727 (2011).

[0655] As such, it is well known in the art that human PUM1 (1186 amino acids) contains an RNA-binding domain (RBD) in the C-terminus of the protein (also known as Pumilio homology domain PUM-HD amino acid 828-amino acid 1175) and that PUFs are based on the RBD of human PUM1. There are 8 structural repeat modules of 36 amino acids (except module 7 which has 43 amino acids) for RNA binding and flanking N- and C-terminal regions important for protein structure and stability. Within each repeat module, amino acids 12, 13, and 16 are important for RNA binding with 12 and 16 responsible for RNA base recognition. Amino acid 13 stacks with RNA bases and can be modified to tune specificity and affinity. Alternatively, the PUF design may maintain amino acid 13 as human PUM1's native residue. In some embodiments of the PUF(CAG) or PUMBY(CAG) compositions disclosed herein, amino acid 13 (for stacking) will be engineered with an H and in other embodiments, will be engineered with a Y. In some embodiments, stacking residues may be modified to improve binding and specificity. Recognition occurs in reverse orientation as N- to C-terminal PUF recognizes 3′ to 5′ RNA. Accordingly, PUF engineering of 8 modules (8PUF), as known in the art, mimics a human protein. An exemplary 8-mer RNA recognition (8PUF) would be designed as follows: R1′-R1-R2-R3-R4-R5-R6-R7-R8-R8′. In one embodiment, an 8PUF is used as the RBD. In another embodiment, a variation of the 8PUF design is used to create a 14-mer RNA recognition (14PUF) RBD, 15-mer RNA recognition (15PUF) RBD, or a 16-mer RNA recognition (16PUF) RBD. In another embodiment, the PUF can be engineered to comprise a 4-mer, 5-mer, 6-mer, 7-mer, 8-mer, 9-mer, 10-mer, 11-mer, 12-mer, 13-mer, 14-mer, 15-mer, 16-mer, 24-mer, 30-mer, 36-mer, or any number of modules between. Shinoda et al., 2018; Criscuolo et al., 2020. Repeats 1-8 of wild type human PUM1 are provided herewith at SEQ ID NOS: 462-469, respectively. The nucleic acid sequence encoding the PUF domain from human PUM1 is SEQ ID NO: 470 and the amino acid sequence of the PUF domain from human PUM1 amino acids 828-1176 is SEQ ID NO: 471. See also U.S. Pat. No. 9,580,714 which is incorporated herein in its entirety.

[0656] In some embodiments of the non-guided RNA-binding fusion proteins of the disclosure, the fusion protein comprises at least one RNA-binding protein or RNA-binding portion thereof which is a PUMBY (Pumilio-based assembly) protein. RNA-binding protein PumHD, which has been widely used in native and modified form for targeting RNA, has been engineered into a protein architecture designed to yield a set of four canonical protein modules, each of which targets one RNA base. These modules (i.e., Pumby, for Pumilio-based assembly) are concatenated in chains of varying composition and length, to bind desired target RNAs. In essence, PUMBY is a more simple and modular form of PumHD, in which a single protein unit of PumHD is concatenated into arrays of arbitrary size and binding sequence specificity. The specificity of such Pumby-RNA interactions is high, with undetectable binding of a Pumby chain to RNA sequences that bear three or more mismatches from the target sequence. Katarzyna et al., PNAS, 2016; 113(19): E2579-E2588. See also US 2016/0238593 which is incorporated by reference herein in its entirety.

[0657] In some embodiments of the compositions of the disclosure, the first RNA binding protein comprises a Pumilio and FBF (PUF) protein. In some embodiments, the first RNA binding protein comprises a Pumilio-based assembly (PUMBY) protein. In some embodiments, the PUF or PUMBY RNA-binding proteins are fused with a nuclease domain such as E17.

[0658] In some embodiments of the compositions of the disclosure, at least one of the RNA-binding proteins or RNA-binding portions thereof is a PPR protein. PPR proteins (proteins with pentatricopeptide repeat (PPR) motifs derived from plants) are nuclear-encoded and exclusively controlled at the RNA level organelles (chloroplasts and mitochondria), cutting, translation, splicing, RNA editing, genes specifically acting on RNA stability. PPR proteins are typically a motif of 35 amino acids and have a structure in which a PPR motif is about 10 contiguous amino acids. The combination of PPR motifs can be used for sequence-selective binding to RNA. PPR proteins are often comprised of PPR motifs of about 10 repeat domains. PPR domains or RNA-binding domains may be configured to be catalytically inactive. WO 2013/058404 incorporated herein by reference in its entirety.

[0659] In some embodiments, the fusion protein disclosed herein comprises a linker between the at least two RNA-binding polypeptides. In some embodiments, the linker is a peptide linker. In one embodiment, the linker is VDTANGS (SEQ ID NO: 411). In some embodiments, the peptide linker comprises one or more repeats of the tri-peptide GGS. In other embodiments, the linker is a non-peptide linker. In some embodiments, the non-peptide linker comprises polyethylene glycol (PEG), polypropylene glycol (PPG), co-poly(ethylene/propylene) glycol, polyoxyethylene (POE), polyurethane, polyphosphazene, polysaccharides, dextran, polyvinyl alcohol, polyvinylpyrrolidones, polyvinyl ethyl ether, polyacryl amide, polyacrylate, polycyanoacrylates, lipid polymers, chitins, hyaluronic acid, heparin, or an alkyl linker.

[0660] In some embodiments, the at least one RNA-binding protein does not require multimerization for RNA-binding activity. In some embodiments, the at least one RNA-binding protein is not a monomer of a multimer complex. In some embodiments, a multimer protein complex does not comprise the RNA binding protein. In some embodiments, the at least one of RNA-binding protein selectively binds to a target sequence within the RNA molecule. In some embodiments, the at least one RNA-binding protein does not comprise an affinity for a second sequence within the RNA molecule. In some embodiments, the at least one RNA-binding protein does not comprise a high affinity for or selectively bind a second sequence within the RNA molecule. In some embodiments, the at least one RNA-binding protein comprises between 2 and 1300 amino acids, inclusive of the endpoints.

[0661] In some embodiments, the at least one RNA-binding protein of the fusion proteins disclosed herein further comprises a sequence encoding a nuclear localization signal (NLS). In some embodiments, a nuclear localization signal (NLS) is positioned at the N-terminus of the RNA binding protein. In some embodiments, the at least one RNA-binding protein comprises an NLS at a C-terminus of the protein. In some embodiments, the at least one RNA-binding protein further comprises a first sequence encoding a first NLS and a second sequence encoding a second NLS. In some embodiments, the first NLS or the second NLS is positioned at the N-terminus of the RNA-binding protein. In some embodiments, the at least one RNA-binding protein comprises the first NLS or the second NLS at a C-terminus of the protein. In some embodiments, the at least one RNA-binding protein further comprises an NES (nuclear export signal) or other peptide tag or secretory signal. In one embodiment, the tag is a FLAG tag.

[0662] In some embodiments, a fusion protein disclosed herein comprises the at least one RNA-binding protein as a first RNA-binding protein together with a second RNA-binding protein comprising or consisting of a nuclease domain.

[0663] In some embodiments, the second RNA-binding polypeptide is operably configured to the first RNA-binding polypeptide at the C-terminus of the first RNA-binding polypeptide. In some embodiments, the second RNA-binding polypeptide is operably configured to the first RNA-binding polypeptide at the N-terminus of the first RNA-binding polypeptide. In one embodiment, an exemplary fusion protein is a PUF or PUMBY-based first RNA-binding protein fused to a second RNA-binding protein which is a zinc-finger endonuclease known as ZC3H12A or truncation of it is shown in SEQ ID NO: 358 (also termed E17).

[0664] An exemplary 8-mer RNA recognition (8PUF) targeting AGCAGCAG (SEQ ID NO: 472) comprises the amino acid sequence: GRSRLLEDFRNNRYPNLQLREIAGHIMEFSQDQHGSRFIELKLERATPAERQLVFNEIL QAAYQLMVDVFGCYVIQKFFEFGSLEQKLALAERIRGHVLSLALQMYGSYVIRKAL EFIPSDQQNEMVRELDGHVLKCVKDQNGSYVVEKCIECVQPQSLQFIIDAFKGQVFA LSTHPYGCRVIQRILEHCLPDQTLPILEELHQHTEQLVQDQYGSYVIRHVLEHGRPED KSKIVAEIRGNVLVLSQHKFASNVVEKCVTHASRTERAVLIDEVCTMNDGPHSALYT MMKDQYACYVVQKMIDVAEPGQRKIVMHKIRPHIATLRKYTYGKHILAKLEKYYM KNGVDLG (SEQ ID NO: 444). In some aspects, SEQ ID NO: 444 comprises an architecture proceeding from the N-terminus to the C-terminus according to: R1′-R1-R2-R3-R4-R5-R6-R7-R8-R8′. In some aspects, SEQ ID NO: 444 is comprised of the sequences detailed in Table 11.

TABLE 11
8PUF protein according to SEQ ID NO: 444

| | RNA | | SEQ |
|---|---|---|---|
| PUF | Recogni- | | ID |
| Module | tion | Amino Acid Sequence | NO: |
| PUF R1′ | — | GRSRLLEDFRNNRYPNLQ | 495 |
| | | LREIAG | |
| PUF R1 | G | HIMEFSQDQHGSRFIELK | 498 |
| | | LERATPAERQLVFNEILQ | |
| PUF R2 | A | AAYQLMVDVFGCYVIQKF | 490 |
| | | FEFGSLEQKLALAERIRG | |
| PUF R3 | C | HVLSLALQMYGSYVIRKA | 508 |
| | | LEFIPSDQQNEMVRELDG | |
| PUF R4 | G | HVLKCVKDQNGSYVVEKC | 504 |
| | | IECVQPQSLQFIIDAFKG | |
| PUF R5 | A | QVFALSTHPYGCRVIQRI | 512 |
| | | LEHCLPDQTLPILEELHQ | |
| PUF R6 | C | HTEQLVQDQYGSYVIRHV | 502 |
| | | LEHGRPEDKSKIVAEIRG | |
| PUF R7 | G | NVLVLSQHKFASNVVEKC | 510 |
| | | VTHASRTERAVLIDEVCT | |
| | | MNDGPHS | |
| PUF R8 | A | ALYTMMKDQYACYVVQKM | 493 |
| | | IDVAEPGQRKIVMHKIRP | |
| PUF R8′ | — | HIATLRKYTYGKHILAKL | 496 |
| | | EKYYMKNGVDLG | |

[0665] An exemplary 8-mer RNA recognition (8PUF) targeting GCAGCAGC (SEQ ID NO: 476) comprises the amino acid sequence: GRSRLLEDFRNNRYPNLQLREIAGHIMEFSQDQHGSYFIRLKLERATPAERQLVFNEI LQAAYQLMVDVFGSNVIEKFFEFGSLEQKLALAERIRGHVLSLALQMYGCRVIQKAL EFIPSDQQNEMVRELDGHVLKCVKDQNGSYVVRKCIECVQPQSLQFIIDAFKGQVFA LSTHPYGSNVIERILEHCLPDQTLPILEELHQHTEQLVQDQYGCRVIQHVLEHGRPED KSKIVAEIRGNVLVLSQHKFASYVVRKCVTHASRTERAVLIDEVCTMNDGPHSALYT MMKDQYASNVVEKMIDVAEPGQRKIVMHKIRPHIATLRKYTYGKHILAKLEKYYM KNGVDLG (SEQ ID NO: 656). In some aspects, SEQ ID NO: 656 comprises an architecture proceeding from the N-terminus to the C-terminus according to: R1′-R1-2-R3-R4-R5-R6-R7-R8-R8′.

[0666] In some aspects, PUF proteins of the disclosure can be modified for improved stacking. Possible mutations for improved stacking are listed in Table T. In some embodiments, PUF modules RI, R2, R3, R4, R5, R6, R7, R8, 1′, and 8′ can be combined in any number and in any order for PUF proteins of the disclosure.

TABLE T
Stacking mutations for PUF proteins

| | RNA | | SEQ | Possible |
|---|---|---|---|---|
| Plasmid | Recogni- | | ID | stacking |
| Element | tion | Amino Acid Sequence | NO: | amino acid |
| PUF 1′ | * | GRSRLLEDFRNNRYPNLQLREIAG | | |
| PUF R1 | A* | HIMEFSQDQHGSRFIQLKLERATPAERQLVFNEILQ | 497 | R, Y |
| PUF R1 | G | HIMEFSQDQHGSRFIELKLERATPAERQLVFNEILQ | 498 | R, N, F |
| PUF R1 | U | HIMEFSQDQHGNRFIQLKLERATPAERQLVFNEILQ | 646 | R, Y, H, F |
| PUF R1 | C | HIMEFSQDQHGSRFIRLKLERATPAERQLVFNEILQ | 499 | R, Y, F |
| PUF R2 | A | AAYQLMVDVFGCYVIQKFFEFGSLEQKLALAERIRG | 490 | Y, R |
| PUF R2 | G | AAYQLMVDVFGSYVIEKFFEFGSLEQKLALAERIRG | 491 | Y, N, F |
| PUF R2 | U* | AAYQLMVDVFGNYVIQKFFEFGSLEQKLALAERIRG | 647 | Y, H, F |
| PUF R2 | C | AAYQLMVDVFGSYVIRKFFEFGSLEQKLALAERIRG | 492 | Y, F |
| PUF R3 | A* | HVLSLALQMYGCRVIQKALEFIPSDQQNEMVRELDG | 506 | R, Y, F |
| PUF R3 | G | HVLSLALQMYGSRVIEKALEFIPSDQQNEMVRELDG | 507 | R, N, F |
| PUF R3 | U | HVLSLALQMYGNRVIQKALEFIPSDQQNEMVRELDG | 648 | R, Y, H, F |
| PUF R3 | C | HVLSLALQMYGSRVIRKALEFIPSDQQNEMVRELDG | 508 | R, Y, F |
| PUF R4 | A | HVLKCVKDQNGCHVVQKCIECVQPQSLQFIIDAFKG | 503 | H, R, Y |
| PUF R4 | G | HVLKCVKDQNGSHVVEKCIECVQPQSLQFIIDAFKG | 504 | H, N, F |
| PUF R4 | U* | HVLKCVKDQNGNHVVQKCIECVQPQSLQFIIDAFKG | 649 | H, Y, F |
| PUF R4 | C | HVLKCVKDQNGSHVVRKCIECVQPQSLQFIIDAFKG | 505 | H, Y, F |
| PUF R5 | A* | QVFALSTHPYGCRVIQRILEHCLPDQTLPILEELHQ | 512 | R, Y |
| PUF R5 | G | QVFALSTHPYGSRVIERILEHCLPDQTLPILEELHQ | 513 | R, N, F |
| PUF R5 | U | QVFALSTHPYGNRVIQRILEHCLPDQTLPILEELHQ | 650 | R, Y, H, F |
| PUF R5 | C | QVFALSTHPYGSRVIRRILEHCLPDQTLPILEELHQ | 514 | R, Y, F |
| PUF R6 | A | HTEQLVQDQYGCYVIQHVLEHGRPEDKSKIVAEIRG | 500 | Y, R |
| PUF R6 | G | HTEQLVQDQYGSYVIEHVLEHGRPEDKSKIVAEIRG | 501 | Y, N, F |
| PUF R6 | U* | HTEQLVQDQYGNYVIQHVLEHGRPEDKSKIVAEIRG | 651 | Y, H, F |
| PUF R6 | C | HTEQLVQDQYGSYVIRHVLEHGRPEDKSKIVAEIRG | 502 | Y, F |
| PUF R7 | A | NVLVLSQHKFACNVVQKCVTHASRTERAVLIDEVCTMNDGPHS | 509 | N, R, Y |
| PUF R7 | G* | NVLVLSQHKFASNVVEKCVTHASRTERAVLIDEVCTMNDGPHS | 510 | N, F |
| PUF R7 | U | NVLVLSQHKFANNVVQKCVTHASRTERAVLIDEVCTMNDGPHS | 652 | N, Y, H, F |
| PUF R7 | C | NVLVLSQHKFASNVVRKCVTHASRTERAVLIDEVCTMNDGPHS | 511 | N, Y, F |
| PUF R8 | A | ALYTMMKDQYACYVVQKMIDVAEPGQRKIVMHKIRP | 493 | Y, R |
| PUF R8 | G | ALYTMMKDQYASYVVEKMIDVAEPGQRKIVMHKIRP | 489 | Y, N, F |
| PUF R8 | U* | ALYTMMKDQYANYVVQKMIDVAEPGQRKIVMHKIRP | 653 | Y, H, F |
| PUF R8 | C | ALYTMMKDQYASYVVRKMIDVAEPGQRKIVMHKIRP | 494 | Y, F |
| 8′ | * | HIATLRKYTYGKHILAKLEKYYMKNGVDLG | 496 | |

[0667] An exemplary 14-mer RNA recognition (14PUF) targeting AGCAGCAGCAGCAG (SEQ ID NO: 473) comprises the amino acid sequence: GRSRLLEDFRNNRYPNLQLREIAGHIMEFSQDQHGSRFIELKLERATPAERQLVFNEILQAAY QLMVDVFGCYVIQKFFEFGSLEQKLALAERIRGHVLSLALQMYGSYVIRKALEFIPSDQQNE MVRELDGHVLKCVKDQNGSYVVEKCIECVQPQSLQFIIDAFKGQVFALSTHPYGCRVIQRILE HCLPDQTLPILEELHQHIMEFSQDQHGSRFIRLKLERATPAERQLVFNEILQAAYQLMVDVFG SYVIEKFFEFGSLEQKLALAERIRGHVLSLALQMYGCRVIQKALEFIPSDQQNEMVRELDGHV LKCVKDQNGSYVVRKCIECVQPQSLQFIIDAFKGQVFALSTHPYGSRVIERILEHCLPDQTLPI LEELHQHTEQLVQDQYGCYVIQHVLEHGRPEDKSKIVAEIRGHTEQLVQDQYGSYVIRHVLE HGRPEDKSKIVAEIRGNVLVLSQHKFASNVVEKCVTHASRTERAVLIDEVCTMNDGPHSALY TMMKDQYACYVVQKMIDVAEPGQRKIVMHKIRPHIATLRKYTYGKHILAKLEKYYMKNGV DLG (SEQ ID NO: 445). In some aspects, SEQ ID NO: 445 comprises an architecture proceeding from the N-terminus to the C-terminus according to: R1′-R1-R2-R3-R4-R5-R1-R2-R3-R4-R5-R6-R6-R7-R8-R8′. In some aspects, SEQ ID NO: 445 is comprised of the sequences detailed in Table 12.

TABLE 12
14PUF protein according to SEQ ID NO: 445

| | RNA | | SEQ |
|---|---|---|---|
| PUF | Recogni- | | ID |
| Module | tion | Amino Acid Sequence | NO |
| PUF R1′ | — | GRSRLLEDFRNNRYPNLQ | 495 |
| | | LREIAG | |
| PUF R1 | G | HIMEFSQDQHGSRFIELK | 498 |
| | | LERATPAERQLVFNEILQ | |
| PUF R2 | A | AAYQLMVDVFGCYVIQKF | 490 |
| | | FEFGSLEQKLALAERIR | |
| | | G | |
| PUF R3 | C | HVLSLALQMYGSYVIRKA | 508 |
| | | LEFIPSDQQNEMVRELD | |
| | | G | |
| PUF R4 | G | HVLKCVKDQNGSYVVEKC | 504 |
| | | IECVQPQSLQFIIDAFKG | |
| PUF R5 | A | QVFALSTHPYGCRVIQRI | 512 |
| | | LEHCLPDQTLPILEELHQ | |
| PUF R1 | C | HIMEFSQDQHGSRFIRLK | 499 |
| | | LERATPAERQLVFNEILQ | |
| PUF R2 | G | AAYQLMVDVFGSYVIEKF | 491 |
| | | FEFGSLEQKLALAERIRG | |
| PUF R3 | A | HVLSLALQMYGCRVIQKA | 506 |
| | | LEFIPSDQQNEMVRELD | |
| | | G | |
| PUF R4 | C | HVLKCVKDQNGSYVVRKC | 505 |
| | | IECVQPQSLQFIIDAFKG | |
| PUF R5 | G | QVFALSTHPYGSR VIER | 513 |
| | | ILEHCLPDQTLPILEELH | |
| | | Q | |
| PUF R6 | A | HTEQLVQDQYGCYVIQHV | 500 |
| | | LEHGRPEDKSKIVAEIRG | |
| PUF R6 | C | HTEQLVQDQYGSYVIRHV | 502 |
| | | LEHGRPEDKSKIVAEIRG | |
| PUF R7 | G | NVLVLSQHKFASNVVEKC | 510 |
| | | VTHASRTERAVLIDEVC | |
| | | TMNDGPHS | |
| PUF R8 | A | ALYTMMKDQYACYVVQKM | 493 |
| | | IDVAEPGQRKIVMHKI | |
| | | RP | |
| PUF R8′ | — | HIATLRKYTYGKHILAKL | 496 |
| | | EKYYMKNGVDLG | |

[0668] An exemplary 14-mer RNA recognition (14PUF) targeting AGCAGCAGCAGCAG (SEQ ID NO: 473) comprises the amino acid sequence: GRSRLLEDFRNNRYPNLQLREIAGHIMEFSQDQHGSRFIELKLERATPAERQLVFNEIL QAAYQLMVDVFGCYVIQKFFEFGSLEQKLALAERIRGHVLSLALQMYGSYVIRKAL EFIPSDQQNEMVRELDGHVLKCVKDQNGSYVVEKCIECVQPQSLQFIIDAFKGQVFA LSTHPYGCRVIQRILEHCLPDQTLPILEELHQHTEQLVQDQYGSYVIRHVLEHGRPED KSKIVAEIRGHIMEFSQDQHGSRFIELKLERATPAERQLVFNEILQAAYQLMVDVFGC YVIQKFFEFGSLEQKLALAERIRGHVLSLALQMYGSYVIRKALEFIPSDQQNEMVREL DGHVLKCVKDQNGSYVVEKCIECVQPQSLQFIIDAFKGQVFALSTHPYGCRVIQRILE HCLPDQTLPILEELHQHTEQLVQDQYGSYVIRHVLEHGRPEDKSKIVAEIRGNVLVLS QHKFASNVVEKCVTHASRTERAVLIDEVCTMNDGPHSALYTMMKDQYACYVVQK MIDVAEPGQRKIVMHKIRPHIATLRKYTYGKHILAKLEKYYMKNGVDLG (SEQ ID NO: 446). In some aspects, SEQ ID NO: 446 comprises an architecture proceeding from the N-terminus to the C-terminus according to: R1′-R1-R2-R3-R4-R5-R6-R1-R2-R3-R4-R5-R6-R7-R8-R8′. In some aspects, SEQ ID NO: 446 is comprised of the sequences detailed in Table 13.

TABLE 13
14PUF protein according to SEQ ID NO: 446

| | RNA | | SEQ |
|---|---|---|---|
| PUF | Recogni- | | ID |
| Module | tion | Amino Acid Sequence | NO |
| PUF R1′ | — | GRSRLLEDFRNNRYPNLQ | 495 |
| | | LREIAG | |
| PUF R1 | G | HIMEFSQDQHGSRFIELK | 498 |
| | | LERATPAERQLVFNEILQ | |
| PUF R2 | A | AAYQLMVDVFGCYVIQKF | 490 |
| | | FEFGSLEQKLALAERIRG | |
| PUF R3 | C | HVLSLALQMYGSYVIRKA | 508 |
| | | LEFIPSDQQNEMVRELDG | |
| PUF R4 | G | HVLKCVKDQNGSYVVEKC | 504 |
| | | IECVQPQSLQFIIDAFKG | |
| PUF R5 | A | QVFALSTHPYGCRVIQRI | 512 |
| | | LEHCLPDQTLPILEELHQ | |
| PUF R6 | C | HTEQLVQDQYGSYVIRHV | 502 |
| | | LEHGRPEDKSKIVAEIRG | |
| PUF R1 | G | HIMEFSQDQHGSRFIELK | 498 |
| | | LERATPAERQLVFNEILQ | |
| PUF R2 | A | AAYQLMVDVFGCYVIQKF | 490 |
| | | FEFGSLEQKLALAERIRG | |
| PUF R3 | C | HVLSLALQMYGSYVIRKA | 508 |
| | | LEFIPSDQQNEMVRELDG | |
| PUF R4 | G | HVLKCVKDQNGSYVVEKC | 504 |
| | | IECVQPQSLQFIIDAFKG | |
| PUF R5 | A | QVFALSTHPYGCRVIQRI | 512 |
| | | LEHCLPDQTLPILEELHQ | |
| PUF R6 | C | HTEQLVQDQYGSYVIRHV | 502 |
| | | LEHGRPEDKSKIVAEIRG | |
| PUF R7 | G | NVLVLSQHKFASNVVEKC | 510 |
| | | VTHASRTERAVLIDEVCT | |
| | | MNDGPHS | |
| PUF R8 | A | ALYTMMKDQYACYVVQKM | 493 |
| | | IDVAEPGQRKIVMHKIRP | |
| PUF R8′ | — | HIATLRKYTYGKHILAKL | 496 |
| | | EKYYMKNGVDLG | |

[0669] An exemplary 15-mer RNA recognition 15PUF targeting AGCAGCAGCAGCAGC (SEQ ID NO: 474) comprises the amino acid sequence: GRSRLLEDFRNNRYPNLQLREIAGHIMEFSQDQHGSRFIRLKLERATPAERQLVFNEIL QAAYQLMVDVFGSYVIEKFFEFGSLEQKLALAERIRGHVLSLALQMYGCRVIQKALE FIPSDQQNEMVRELDGHVLKCVKDQNGSYVVRKCIECVQPQSLQFIIDAFKGQVFAL STHPYGSRVIERILEHCLPDQTLPILEELHQHIMEFSQDQHGSRFIQLKLERATPAERQL VFNEILQAAYQLMVDVFGSYVIRKFFEFGSLEQKLALAERIRGHVLSLALQMYGSRV IEKALEFIPSDQQNEMVRELDGHVLKCVKDQNGCHVVQKCIECVQPQSLQFIIDAFK GQVFALSTHPYGSRVIRRILEHCLPDQTLPILEELHQHTEQLVQDQYGSYVIEHVLEH GRPEDKSKIVAEIRGNVLVLSQHKFACNVVQKCVTHASRTERAVLIDEVCTMNDGP HSHTEQLVQDQYGSYVIRHVLEHGRPEDKSKIVAEIRGNVLVLSQHKFASNVVEKCV THASRTERAVLIDEVCTMNDGPHSALYTMMKDQYACYVVQKMIDVAEPGQRKIVM HKIRPHIATLRKYTYGKHILAKLEKYYMKNGVDLG (SEQ ID NO: 447). In some aspects, SEQ ID NO: 447 comprises an architecture proceeding from the N-terminus to the C-terminus according to: R1′-R1-R2-R3-R4-R5-R1-R2-R3-R4-R5-R6-R7-R6-R7-R8-R8′. In some aspects, SEQ ID NO: 447 is comprised of the sequences detailed in Table 14.

TABLE 14
15PUF protein according to SEQ ID NO: 447

| | RNA | | SEQ |
|---|---|---|---|
| PUF | Recog- | | ID |
| Module | nition | Amino Acid Sequence | NO |
| PUF R1′ | — | GRSRLLEDFRNNRYPNLQ | 495 |
| | | LREIAG | |
| PUF R1 | C | HIMEFSQDQHGSRFIRLK | 499 |
| | | LERATPAERQLVFNEILQ | |
| PUF R2 | G | AAYQLMVDVFGSYVIEKF | 491 |
| | | FEFGSLEQKLALAERIRG | |
| PUF R3 | A | HVLSLALQMYGCRVIQKA | 506 |
| | | LEFIPSDQQNEMVRELDG | |
| PUF R4 | C | HVLKCVKDQNGSYVVRKC | 505 |
| | | IECVQPQSLQFIIDAFKG | |
| PUF R5 | G | QVFALSTHPYGSRVIERI | 513 |
| | | LEHCLPDQTLPILEELHQ | |
| PUF R1 | A | HIMEFSQDQHGSRFIQLK | 497 |
| | | LERATPAERQLVFNEILQ | |
| PUF R2 | C | AAYQLMVDVFGSYVIRKF | 492 |
| | | FEFGSLEQKLALAERIRG | |
| PUF R3 | G | HVLSLALQMYGSRVIEKA | 507 |
| | | LEFIPSDQQNEMVRELDG | |
| PUF R4 | A | HVLKCVKDQNGCHVVQKC | 503 |
| | | IECVQPQSLQFIIDAFKG | |
| PUF R5 | C | QVFALSTHPYGSRVIRRI | 514 |
| | | LEHCLPDQTLPILEELHQ | |
| PUF R6 | G | HTEQLVQDQYGSYVIEHV | 51 |
| | | LEHGRPEDKSKIVAEIRG | |
| PUF R7 | A | NVLVLSQHKFACNVVQKC | 509 |
| | | VTHASRTERAVLIDEVCT | |
| | | MNDGPHS | |
| PUF R6 | C | HTEQLVQDQYGSYVIRHV | 502 |
| | | LEHGRPEDKSKIVAEIRG | |
| PUF R7 | G | NVLVLSQHKFASNVVEKC | 510 |
| | | VTHASRTERAVLIDEVCT | |
| | | MNDGPHS | |
| PUF R8 | A | ALYTMMKDQYACYVVQKM | 493 |
| | | IDVAEPGQRKIVMHKIRP | |
| PUF R8′ | — | HIATLRKYTYGKHILAKL | 496 |
| | | EKYYMKNGVDLG | |

[0670] An exemplary 15-mer RNA recognition (15PUF) targeting AGCAGCAGCAGCAGC (SEQ ID NO: 474) comprises the amino acid sequence: GRSRLLEDFRNNRYPNLQLREIAGHIMEFSQDQHGSRFIRLKLERATPAERQLVFNEIL QAAYQLMVDVFGSYVIEKFFEFGSLEQKLALAERIRGHVLSLALQMYGCRVIQKALE FIPSDQQNEMVRELDGHVLKCVKDQNGSYVVRKCIECVQPQSLQFIIDAFKGQVFAL STHPYGSRVIERILEHCLPDQTLPILEELHQHTEQLVQDQYGCYVIQHVLEHGRPEDK SKIVAEIRGHIMEFSQDQHGSRFIRLKLERATPAERQLVFNEILQAAYQLMVDVFGSY VIEKFFEFGSLEQKLALAERIRGHVLSLALQMYGCRVIQKALEFIPSDQQNEMVRELD GHVLKCVKDQNGSYVVRKCIECVQPQSLQFIIDAFKGQVFALSTHPYGSRVIERILEH CLPDQTLPILEELHQHTEQLVQDQYGCYVIQHVLEHGRPEDKSKIVAEIRGNVLVLSQ HKFASYVVRKCVTHASRTERAVLIDEVCTMNDGPHSNVLVLSQHKFASNVVEKCVT HASRTERAVLIDEVCTMNDGPHSALYTMMKDQYACYVVQKMIDVAEPGQRKIVMH KIRPHIATLRKYTYGKHILAKLEKYYMKNGVDLG (SEQ ID NO: 448). In some aspects, SEQ ID NO: 448 comprises an architecture proceeding from the N-terminus to the C-terminus according to: R1′-R1-R2-R3-R4-R5-R6-R1-R2-R3-R4-R5-R6-R7-R7-R8-R8′. In some aspects, SEQ ID NO: 448 is comprised of the sequences detailed in Table 15.

TABLE 15
15PUF protein according to SEQ ID NO: 448

| | RNA | | SEQ |
|---|---|---|---|
| PUF | Recog- | | ID |
| Module | nition | Amino Acid Sequence | NO |
| PUF R1′ | — | GRSRLLEDFRNNRYPNLQ | 495 |
| | | LREIAG | |
| PUF R1 | C | HIMEFSQDQHGSRFIRLK | 499 |
| | | LERATPAERQLVFNEILQ | |
| PUF R2 | G | AAYQLMVDVFGSYVIEKF | 491 |
| | | FEFGSLEQKLALAERIRG | |
| PUF R3 | A | HVLSLALQMYGCRVIQKA | 506 |
| | | LEFIPSDQQNEMVRELDG | |
| PUF R4 | C | HVLKCVKDQNGSYVVRKC | 505 |
| | | IECVQPQSLQFIIDAFKG | |
| PUF R5 | G | QVFALSTHPYGSRVIERI | 513 |
| | | LEHCLPDQTLPILEELHQ | |
| PUF R6 | A | HTEQLVQDQYGCYVIQHV | 500 |
| | | LEHGRPEDKSKIVAEIRG | |
| PUF R1 | C | HIMEFSQDQHGSRFIRLK | 499 |
| | | LERATPAERQLVFNEILQ | |
| PUF R2 | G | AAYQLMVDVFGSYVIEKF | 491 |
| | | FEFGSLEQKLALAERIRG | |
| PUF R3 | A | HVLSLALQMYGCRVIQKA | 506 |
| | | LEFIPSDQQNEMVRELDG | |
| PUF R4 | C | HVLKCVKDQNGSYVVRKC | 505 |
| | | IECVQPQSLQFIIDAFKG | |
| PUF R5 | G | QVFALSTHPYGSR VIER | 513 |
| | | ILEHCLPDQTLPILEELH | |
| | | Q | |
| PUF R6 | A | HTEQLVQDQYGCYVIQHV | 50 |
| | | LEHGRPEDKSKIVAEIRG | |
| PUF R7 | C | NVLVLSQHKFASYVVRKC | 511 |
| | | VTHASRTERAVLIDEVCT | |
| | | MN | |
| | | DGPHS | |
| PUF R7 | G | NVLVLSQHKFASNVVEKC | 510 |
| | | VTHASRTERAVLIDEVCT | |
| | | MN | |
| | | DGPHS | |
| PUF R8 | A | ALYTMMKDQYACYVVQKM | 493 |
| | | IDVAEPGQRKIVMHKIRP | |
| PUF R8′ | — | HIATLRKYTYGKHILAKL | 496 |
| | | EKYYMKNGVDLG | |

[0671] An exemplary 15-mer RNA recognition (5U) targeting AGCAGCAGCAGCAGC (SEQ ID NO: 474) comprises the amino acid sequence: GRSRLLEDFRNNRYPNLQLREIAGHIMEFSQDQHGSRFIRLKLERATPAERQLVFNEIL QAAYQLMVDVFGSYVIEKFFEFGSLEQKLALAERIRGHVLSLALQMYGCRVIQKALE FIPSDQQNEMVRELDGHVLKCVKDQNGSYVVRKCIECVQPQSLQFIIDAFKGQVFAL STHPYGSRVIERILEHCLPDQTLPILEELHQHTEQLVQDQYGCYVIQHVLEHGRPEDK SKIVAEIRGNVLVLSQHKFASYVVRKCVTHASRTERAVLIDEVCTMNDGPHSHIMEF SQDQHGSRFIELKLERATPAERQLVFNEILQAAYQLMVDVFGCYVIQKFFEFGSLEQK LALAERIRGHVLSLALQMYGSYVIRKALEFIPSDQQNEMVRELDGHVLKCVKDQNG SYVVEKCIECVQPQSLQFIIDAFKGQVFALSTHPYGCRVIQRILEHCLPDQTLPILEELH QHTEQLVQDQYGSYVIRHVLEHGRPEDKSKIVAEIRGNVLVLSQHKFASNVVEKCVT HASRTERAVLIDEVCTMNDGPHSALYTMMKDQYACYVVQKMIDVAEPGQRKIVMH KIRPHIATLRKYTYGKHILAKLEKYYMKNGVDLG (SEQ ID NO: 461). In some aspects, SEQ ID NO: 461 comprises an architecture proceeding from the N-terminus to the C-terminus according to: R1′-R1-R2-R3-R4-R5-R6-R7-R1-R2-R3-R4-R5-R6-R7-R8-R8′. In some aspects, SEQ ID NO: 461 is comprised of the sequences detailed in Table 16.

TABLE 16
15PUF protein according to SEQ ID NO: 461

| | RNA | | SEQ |
|---|---|---|---|
| PUF | Recog- | | ID |
| Module | nition | Amino Acid Sequence | NO |
| PUF R1′ | — | GRSRLLEDFRNNRYPNLQ | 495 |
| | | LREIAG | |
| PUF R1 | C | HIMEFSQDQHGSRFIRLK | 499 |
| | | LERATPAERQLVFNEILQ | |
| PUF R2 | G | AAYQLMVDVFGSYVIEKF | 491 |
| | | FEFGSLEQKLALAERIRG | |
| PUF R3 | A | HVLSLALQMYGCRVIQKA | 506 |
| | | LEFIPSDQQNEMVRELDG | |
| PUF R4 | C | HVLKCVKDQNGSYVVRKC | 505 |
| | | IECVQPQSLQFIIDAFKG | |
| PUF R5 | G | QVFALSTHPYGSRVIERI | 513 |
| | | LEHCLPDQTLPILEELHQ | |
| PUF R6 | A | HTEQLVQDQYGCYVIQHV | 500 |
| | | LEHGRPEDKSKIVAEIRG | |
| PUF R7 | C | NVLVLSQHKFASYVVRKC | 511 |
| | | VTHASRTERAVLIDEVCT | |
| | | MNDGPHS | |
| PUF R1 | G | HIMEFSQDQHGSRFIELK | 498 |
| | | LERATPAERQLVFNEILQ | |
| PUF R2 | A | AAYQLMVDVFGCYVIQKF | 490 |
| | | FEFGSLEQKLALAERIRG | |
| PUF R3 | C | HVLSLALQMYGSYVIRKA | 508 |
| | | LEFIPSDQQNEMVRELDG | |
| PUF R4 | G | HVLKCVKDQNGSYVVEKC | 504 |
| | | IECVQPQSLQFIIDAFKG | |
| PUF R5 | A | QVFALSTHPYGCRVIQRI | 512 |
| | | LEHCLPDQTLPILEELHQ | |
| PUF R6 | C | HTEQLVQDQYGSYVIRHV | 502 |
| | | LEHGRPEDKSKIVAEIRG | |
| PUF R7 | G | NVLVLSQHKFASNVVEKC | 510 |
| | | VTHASRTERAVLIDEVCT | |
| | | MNDGPHS | |
| PUF R8 | A | ALYTMMKDQYACYVVQKM | 493 |
| | | IDVAEPGQRKIVMHKIRP | |
| PUF R8′ | — | HIATLRKYTYGKHILAKL | 496 |
| | | EKYYMKNGVDLG | |

[0672] An exemplary 16-mer RNA recognition (16PUF) targeting AGCAGCAGCAGCAGCA (SEQ ID NO: 475) comprises the amino acid sequence: GRSRLLEDFRNNRYPNLQLREIAGHIMEFSQDQHGSRFIQLKLERATPAERQLVFNEI LQAAYQLMVDVFGSYVIRKFFEFGSLEQKLALAERIRGHVLSLALQMYGSRVIEKAL EFIPSDQQNEMVRELDGHVLKCVKDQNGCHVVQKCIECVQPQSLQFIIDAFKGQVFA LSTHPYGSRVIRRILEHCLPDQTLPILEELHQHIMEFSQDQHGSRFIELKLERATPAERQ LVFNEILQAAYQLMVDVFGCYVIQKFFEFGSLEQKLALAERIRGHVLSLALQMYGSY VIRKALEFIPSDQQNEMVRELDGHVLKCVKDQNGSYVVEKCIECVQPQSLQFIIDAFK GQVFALSTHPYGCRVIQRILEHCLPDQTLPILEELHQHTEQLVQDQYGSYVIRHVLEH GRPEDKSKIVAEIRGNVLVLSQHKFASNVVEKCVTHASRTERAVLIDEVCTMNDGPH SALYTMMKDQYACYVVQKMIDVAEPGQRKIVMHKIRPHTEQLVQDQYGSYVIRHV LEHGRPEDKSKIVAEIRGNVLVLSQHKFASNVVEKCVTHASRTERAVLIDEVCTMND GPHSALYTMMKDQYACYVVQKMIDVAEPGQRKIVMHKIRPHIATLRKYTYGKHILA KLEKYYMKNGVDLG (SEQ ID NO: 449). In some aspects, SEQ ID NO: 449 comprises an architecture proceeding from the N-terminus to the C-terminus according to: R1′-R1-R2-R3-R4-R5-R1-R2-R3-R4-R5-R6-R7-R8-R6-R7-R8-R8′. In some aspects, SEQ ID NO: 449 is comprised of the sequences detailed in Table 17.

TABLE 17
16PUF protein according to SEQ ID NO: 449

| | RNA | | SEQ |
|---|---|---|---|
| PUF | Recog | | ID |
| Module | nition | Amino Acid Sequence | NO |
| PUF | — | GRSRLLEDFRNNRYPNLQLREIAG | 495 |
| R1′ | | | |
| PUF | A | HIMEFSQDQHGSRFIQLKLERAT | 497 |
| R1 | | PAERQLVFNEILQ | |
| PUF R2 | C | AAYQLMVDVFGSYVIRKFFEFGS | 492 |
| | | LEQKLALAERIRG | |
| PUF R3 | G | HVLSLALQMYGSRVIEKALEFIP | 507 |
| | | SDQQNEMVRELDG | |
| PUF R4 | A | HVLKCVKDQNGCHVVQKCIECVQ | 503 |
| | | PQSLQFIIDAFKG | |
| PUF R5 | C | QVFALSTHPYGSRVIRRILEHCL | 514 |
| | | PDQTLPILEELHQ | |
| PUF | G | HIMEFSQDQHGSRFIELKLERAT | 498 |
| R1 | | PAERQLVFNEILQ | |
| PUF R2 | A | AAYQLMVDVFGCYVIQKFFEFGS | 490 |
| | | LEQKLALAERIRG | |
| PUF R3 | C | HVLSLALQMYGSYVIRKALEFIP | 508 |
| | | SDQQNEMVRELDG | |
| PUF R4 | G | HVLKCVKDQNGSYVVEKCIECVQ | 54 |
| | | PQSLQFIIDAFKG | |
| PUF R5 | A | QVFALSTHPYGCRVIQRILEHCL | 512 |
| | | PDQTLPILEELHQ | |
| PUF R6 | C | HTEQLVQDQYGSYVIRHVLEHGR | 502 |
| | | PEDKSKIVAEIRG | |
| PUF R7 | G | NVLVLSQHKFASNVVEKCVTHASR | 510 |
| | | TERAVLIDEVCTMNDGPHS | |
| PUF R8 | A | ALYTMMKDQYACYVVQKMIDVAEP | 493 |
| | | GQRKIVMHKIRP | |
| PUF R6 | C | HTEQLVQDQYGSYVIRHVLEHGR | 502 |
| | | PEDKSKIVAEIRG | |
| PUF R7 | G | NVLVLSQHKFASNVVEKCVTHAS | 510 |
| | | RTERAVLIDEVCTMNDGPHS | |
| PUF R8 | A | ALYTMMKDQYACYVVQKMIDVAE | 493 |
| | | PGQRKIVMHKIRP | |
| PUF | — | HIATLRKYTYGKHILAKLEKYYMK | 496 |
| R8′ | | NGVDLG | |

[0673] An exemplary 16-mer RNA recognition (16PUF) targeting AGCAGCAGCAGCAGCA (SEQ ID NO: 475) comprises the amino acid sequence: GRSRLLEDFRNNRYPNLQLREIAGHIMEFSQDQHGSRFIQLKLERATPAERQLVFNEI LQAAYQLMVDVFGSYVIRKFFEFGSLEQKLALAERIRGHVLSLALQMYGSRVIEKAL EFIPSDQQNEMVRELDGHVLKCVKDQNGCHVVQKCIECVQPQSLQFIIDAFKGQVFA LSTHPYGSRVIRRILEHCLPDQTLPILEELHQHTEQLVQDQYGSYVIEHVLEHGRPED KSKIVAEIRGHIMEFSQDQHGSRFIQLKLERATPAERQLVFNEILQAAYQLMVDVFGS YVIRKFFEFGSLEQKLALAERIRGHVLSLALQMYGSRVIEKALEFIPSDQQNEMVREL DGHVLKCVKDQNGCHVVQKCIECVQPQSLQFIIDAFKGQVFALSTHPYGSRVIRRILE HCLPDQTLPILEELHQHTEQLVQDQYGSYVIEHVLEHGRPEDKSKIVAEIRGNVLVLS QHKFACNVVQKCVTHASRTERAVLIDEVCTMNDGPHSALYTMMKDQYASYVVRK MIDVAEPGQRKIVMHKIRPNVLVLSQHKFASNVVEKCVTHASRTERAVLIDEVCTM NDGPHSALYTMMKDQYACYVVQKMIDVAEPGQRKIVMHKIRPHIATLRKYTYGKH ILAKLEKYYMKNGVDLG (SEQ ID NO: 450). In some aspects, SEQ ID NO: 450 comprises an architecture proceeding from the N-terminus to the C-terminus according to: R1′-R1-R2-R3-R4-R5-R6-R1-R2-R3-R4-R5-R6-R7-R8-R7-R8-R8′. In some aspects, SEQ ID NO: 450 is comprised of the sequences detailed in Table 18.

TABLE 18
16PUF protein according to SEQ ID NO: 450

| | RNA | | SEQ |
|---|---|---|---|
| PUF | Recog | | ID |
| Module | nition | Amino Acid Sequence | NO |
| PUF R1′ | — | GRSRLLEDFRNNRYPNLQLREIAG | 495 |
| PUF R1 | A | HIMEFSQDQHGSRFIQLKLERATPAERQLVFNEILQ | 497 |
| PUF R2 | C | AAYQLMVDVFGSYVIRKFFEFGSLEQKLALAERIRG | 492 |
| PUF R3 | G | HVLSLALQMYGSRVIEKALEFIPSDQQNEMVRELDG | 507 |
| PUF R4 | A | HVLKCVKDQNGCHVVQKCIECVQPQSLQFIIDAFKG | 503 |
| PUF R5 | C | QVFALSTHPYGSRVIRRILEHCLPDQTLPILEELHQ | 514 |
| PUF R6 | G | HTEQLVQDQYGSYVIEHVLEHGRPEDKSKIVAEIRG | 501 |
| PUF R1 | A | HIMEFSQDQHGSRFIQLKLERATPAERQLVFNEILQ | 497 |
| PUF R2 | C | AAYQLMVDVFGSYVIRKFFEFGSLEQKLALAERIRG | 492 |
| PUF R3 | G | HVLSLALQMYGSRVIEKALEFIPSDQQNEMVRELDG | 507 |
| PUF R4 | A | HVLKCVKDQNGCHVVQKCIECVQPQSLQFIIDAFKG | 503 |
| PUF R5 | C | QVFALSTHPYGSRVIRRILEHCLPDQTLPILEELHQ | 514 |
| PUF R6 | G | HTEQLVQDQYGSYVIEHVLEHGRPEDKSKIVAEIRG | 501 |
| PUF R7 | A | NVLVLSQHKFACNVVQKCVTHASRTERAVLIDEVCT | 509 |
| | | MNDGPHS | |
| PUF R8 | C | ALYTMMKDQYASYVVRKMIDVAEPGQRKIVMHKIRP | 494 |
| PUF R7 | G | NVLVLSQHKFASNVVEKCVTHASRTERAVLIDEVCT | 51 |
| | | MNDGPHS | |
| PUF R8 | A | ALYTMMKDQYACYVVQKMIDVAEPGQRKIVMHKIRP | 493 |
| PUF R8′ | — | HIATLRKYTYGKHILAKLEKYYMKNGVDLG | 496 |

[0674] An exemplary 16-mer RNA recognition (16PUF) targeting AGCAGCAGCAGCAGCA (SEQ ID NO: 475) comprises the amino acid sequence: GRSRLLEDFRNNRYPNLQLREIAGHIMEFSQDQHGSRFIQLKLERATPAERQLVFNEI LQAAYQLMVDVFGSYVIRKFFEFGSLEQKLALAERIRGHVLSLALQMYGSRVIEKAL EFIPSDQQNEMVRELDGHVLKCVKDQNGCHVVQKCIECVQPQSLQFIIDAFKGQVFA LSTHPYGSRVIRRILEHCLPDQTLPILEELHQHTEQLVQDQYGSYVIEHVLEHGRPED KSKIVAEIRGNVLVLSQHKFACNVVQKCVTHASRTERAVLIDEVCTMNDGPHSALY TMMKDQYASYVVRKMIDVAEPGQRKIVMHKIRPHIMEFSQDQHGSRFIELKLERATP AERQLVFNEILQAAYQLMVDVFGCYVIQKFFEFGSLEQKLALAERIRGHVLSLALQM YGSYVIRKALEFIPSDQQNEMVRELDGHVLKCVKDQNGSYVVEKCIECVQPQSLQFII DAFKGQVFALSTHPYGCRVIQRILEHCLPDQTLPILEELHQHTEQLVQDQYGSYVIRH VLEHGRPEDKSKIVAEIRGNVLVLSQHKFASNVVEKCVTHASRTERAVLIDEVCTMN DGPHSALYTMMKDQYACYVVQKMIDVAEPGQRKIVMHKIRPHIATLRKYTYGKHIL AKLEKYYMKNGVDLG (SEQ ID NO: 451). In some aspects, SEQ ID NO: 451 comprises an architecture proceeding from the N-terminus to the C-terminus according to: R1′-R1-R2-R3-R4-R5-R6-R7-R8-R1-R2-R3-R4-R5-R6-R7-R8-R8′. In some aspects, SEQ ID NO: 451 is comprised of the sequences detailed in Table 19.

TABLE 19
16PUF protein according to SEQ ID NO: 451

| | RNA | | SEQ |
|---|---|---|---|
| PUF | Recog | | ID |
| Module | nition | Amino Acid Sequence | NO |
| PUF R1′ | — | GRSRLLEDFRNNRYPNLQLREIAG | 495 |
| PUF R1 | A | HIMEFSQDQHGSRFIQLKLERATPAERQLVFNEILQ | 497 |
| PUF R2 | C | AAYQLMVDVFGSYVIRKFFEFGSLEQKLALAERIRG | 492 |
| PUF R3 | G | HVLSLALQMYGSRVIEKALEFIPSDQQNEMVRELDG | 507 |
| PUF R4 | A | HVLKCVKDQNGCHVVQKCIECVQPQSLQFIIDAFKG | 503 |
| PUF R5 | C | QVFALSTHPYGSRVIRRILEHCLPDQTLPILEELHQ | 514 |
| PUF R6 | G | HTEQLVQDQYGSYVIEHVLEHGRPEDKSKIVAEIRG | 501 |
| PUF R7 | A | NVLVLSQHKFACNVVQKCVTHASRTERAVLIDEVCT | 509 |
| | | MNDGPHS | |
| PUF R8 | C | ALYTMMKDQYASYVVRKMIDVAEPGQRKIVMHKIRP | 494 |
| PUF R1 | G | HIMEFSQDQHGSRFIELKLERATPAERQLVFNEILQ | 498 |
| PUF R2 | A | AAYQLMVDVFGCYVIQKFFEFGSLEQKLALAERIRG | 490 |
| PUF R3 | C | HVLSLALQMYGSYVIRKALEFIPSDQQNEMVRELDG | 508 |
| PUF R4 | G | HVLKCVKDQNGSYVVEKCIECVQPQSLQFIIDAFKG | 504 |
| PUF R5 | A | QVFALSTHPYGCRVIQRILEHCLPDQTLPILEELHQ | 512 |
| PUF R6 | C | HTEQLVQDQYGSYVIRHVLEHGRPEDKSKIVAEIRG | 52 |
| PUF R7 | G | NVLVLSQHKFASNVVEKCVTHASRTERAVLIDEVCT | 510 |
| | | MNDGPHS | |
| PUF R8 | A | ALYTMMKDQYACYVVQKMIDVAEPGQRKIVMHKIRP | 493 |
| PUF R8′ | — | HIATLRKYTYGKHILAKLEKYYMKNGVDLG | 496 |

[0675] An exemplary 8-mer RNA recognition (8PUF) targeting CAGCAGCA (SEQ ID NO: 453) comprises the amino acid sequence: GRSRLLEDFRNNRYPNLQLREIAGHIMEFSQDQHGSRFIQLKLERATPAERQLVFNEI LQAAYQLMVDVFGSYVIRKFFEFGSLEQKLALAERIRGHVLSLALQMYGSRVIEKAL EFIPSDQQNEMVRELDGHVLKCVKDQNGCYVVQKCIECVQPQSLQFIIDAFKGQVFA LSTHPYGSRVIRRILEHCLPDQTLPILEELHQHTEQLVQDQYGSYVIEHVLEHGRPED KSKIVAEIRGNVLVLSQHKFACNVVQKCVTHASRTERAVLIDEVCTMNDGPHSALY TMMKDQYASYVVRKMIDVAEPGQRKIVMHKIRPHIATLRKYTYGKHILAKLEKYY MKNGVDLG (SEQ ID NO: 480). In some aspects, SEQ ID NO: 480 comprises an architecture proceeding from the N-terminus to the C-terminus according to: R1′-R1-R2-R3-R4-R5-R6-R7-R8-R8′. In some aspects, SEQ ID NO: 480 is comprised of the sequences detailed in Table 20.

TABLE 20
8PUF protein according to SEQ ID NO: 480

| | SEQ | RNA | SEQ | | SEQ |
|---|---|---|---|---|---|
| PUF | ID | Recog | ID | | ID |
| Module | NO | nition | NO | Amino Acid Sequence | NO |
| PUF R1′ | 495 | | 495 | GRSRLLEDFRNNRYPNLQ | 495 |
| | | | | LREIAG | |
| PUF R1 | 497 | A | 497 | HIMEFSQDQHGSRFIQLK | 497 |
| | | | | LERATPAERQLVFNEILQ | |
| PUF R2 | 492 | C | 492 | AAYQLMVDVFGSYVIRKF | 492 |
| | | | | FEFGSLEQKLALAERIRG | |
| PUF R3 | 507 | G | 507 | HVLSLALQMYGSRVIEKA | 507 |
| | | | | LEFIPSDQQNEMVRELDG | |
| PUF R4 | 503 | A | 503 | HVLKCVKDQNGCYVVQKC | 503 |
| | | | | IECVQPQSLQFIIDAFKG | |
| PUF R5 | 514 | C | 514 | QVFALSTHPYGSRVIRRI | 514 |
| | | | | LEHCLPDQTLPILEELHQ | |
| PUF R6 | 501 | G | 501 | HTEQLVQDQYGSYVIEHV | 501 |
| | | | | LEHGRPEDKSKIVAEIRG | |
| PUF R7 | 509 | A | 509 | NVLVLSQHKFACNVVQKC | 509 |
| | | | | VTHASRTERAVLIDEVCT | |
| | | | | MNDGPHS | |
| PUF R8 | 494 | C | 494 | ALYTMMKDQYASYVVRKM | 494 |
| | | | | IDVAEPGQRKIVMHKIRP | |
| PUF R8′ | 496 | | 496 | HIATLRKYTYGKHILAKL | 496 |
| | | | | EKYYMKNGVDLG | |

[0676] An exemplary 14-mer RNA recognition (14PUF) targeting CAGCAGCAGCAGCA (SEQ ID NO: 454) comprises the amino acid sequence: GRSRLLEDFRNNRYPNLQLREIAGHIMEFSQDQHGSRFIQLKLERATPAERQLVFNEI LQAAYQLMVDVFGSYVIRKFFEFGSLEQKLALAERIRGHVLSLALQMYGSRVIEKAL EFIPSDQQNEMVRELDGHVLKCVKDQNGCHVVQKCIECVQPQSLQFIIDAFKGQVFA LSTHPYGSRVIRRILEHCLPDQTLPILEELHQHIMEFSQDQHGSRFIELKLERATPAERQ LVFNEILQAAYQLMVDVFGCYVIQKFFEFGSLEQKLALAERIRGHVLSLALQMYGSY VIRKALEFIPSDQQNEMVRELDGHVLKCVKDQNGSYVVEKCIECVQPQSLQFIIDAFK GQVFALSTHPYGCRVIQRILEHCLPDQTLPILEELHQHTEQLVQDQYGSYVIRHVLEH GRPEDKSKIVAEIRGHTEQLVQDQYGSYVIEHVLEHGRPEDKSKIVAEIRGNVLVLSQ HKFACNVVQKCVTHASRTERAVLIDEVCTMNDGPHSALYTMMKDQYASYVVRKMI DVAEPGQRKIVMHKIRPHIATLRKYTYGKHILAKLEKYYMKNGVDLG (SEQ ID NO: 481). In some aspects, SEQ ID NO: 481 comprises an architecture proceeding from the N-terminus to the C-terminus according to: R1′-R-R2-R3-R4-R5-R1-R2-R3-R4-R5-R6-R6-R7-R8-R8′. In some aspects, SEQ ID NO: 481 is comprised of the sequences detailed in Table 21.

TABLE 21
14PUF protein according to SEQ ID NO: 481

| | SEQ | RNA | SEQ | | SEQ |
|---|---|---|---|---|---|
| PUF | ID | Recog | ID | | ID |
| Module | NO | nition | NO | Amino Acid Sequence | NO |
| PUF R1′ | 495 | | 495 | GRSRLLEDFRNNRYPNLQ | 495 |
| | | | | LREIAG | |
| PUF R1 | 497 | A | 497 | HIMEFSQDQHGSRFIQLK | 497 |
| | | | | LERATPAERQLVFNEILQ | |
| PUF R2 | 492 | C | 492 | AAYQLMVDVFGSYVIRKF | 492 |
| | | | | FEFGSLEQKLALAERIRG | |
| PUF R3 | 507 | G | 507 | HVLSLALQMYGSRVIEKA | 507 |
| | | | | LEFIPSDQQNEMVRELDG | |
| PUF R4 | 503 | A | 503 | HVLKCVKDQNGCHVVQKC | 503 |
| | | | | IECVQPQSLQFIIDAFKG | |
| PUF R5 | 514 | C | 514 | QVFALSTHPYGSRVIRRI | 514 |
| | | | | LEHCLPDQTLPILEELHQ | |
| PUF R1 | 498 | G | 498 | HIMEFSQDQHGSRFIELK | 498 |
| | | | | LERATPAERQLVFNEILQ | |
| PUF R2 | 490 | A | 490 | AAYQLMVDVFGCYVIQKF | 490 |
| | | | | FEFGSLEQKLALAERIRG | |
| PUF R3 | 508 | C | 508 | HVLSLALQMYGSYVIRKA | 508 |
| | | | | LEFIPSDQQNEMVRELDG | |
| PUF R4 | 504 | G | 504 | HVLKCVKDQNGSYVVEKC | 504 |
| | | | | IECVQPQSLQFIIDAFKG | |
| PUF R5 | 512 | A | 512 | QVFALSTHPYGCRVIQRI | 512 |
| | | | | LEHCLPDQTLPILEELHQ | |
| PUF R6 | 502 | C | 502 | HTEQLVQDQYGSYVIRHV | 502 |
| | | | | LEHGRPEDKSKIVAEIRG | |
| PUF R6 | 501 | G | 501 | HTEQLVQDQYGSYVIEHV | 501 |
| | | | | LEHGRPEDKSKIVAEIRG | |
| PUF R7 | 509 | A | 509 | NVLVLSQHKFACNVVQKC | 509 |
| | | | | VTHASRTERAVLIDEVCT | |
| | | | | MNDGPHS | |
| PUF R8 | 494 | C | 494 | ALYTMMKDQYASYVVRKM | 494 |
| | | | | IDVAEPGQRKIVMHKIRP | |
| PUF R8′ | 496 | | 496 | HIATLRKYTYGKHILAKL | 496 |
| | | | | EKYYMKNGVDLG | |

[0677] An exemplary 14-mer RNA recognition (14PUF) targeting CAGCAGCAGCAGCA (SEQ ID NO: 454) comprises the amino acid sequence: GRSRLLEDFRNNRYPNLQLREIAGHIMEFSQDQHGSRFIQLKLERATPAERQLVFNEILQAAY QLMVDVFGSYVIRKFFEFGSLEQKLALAERIRGHVLSLALQMYGSRVIEKALEFIPSDQQNEM VRELDGHVLKCVKDQNGCHVVQKCIECVQPQSLQFIIDAFKGQVFALSTHPYGSRVIRRILEH CLPDQTLPILEELHQHTEQLVQDQYGSYVIEHVLEHGRPEDKSKIVAEIRGHIMEFSQDQHGS RFIQLKLERATPAERQLVFNEILQAAYQLMVDVFGSYVIRKFFEFGSLEQKLALAERIRGHVL SLALQMYGSRVIEKALEFIPSDQQNEMVRELDGHVLKCVKDQNGCHVVQKCIECVQPQSLQ FIIDAFKGQVFALSTHPYGSRVIRRILEHCLPDQTLPILEELHQHTEQLVQDQYGSYVIEHVLE HGRPEDKSKIVAEIRGNVLVLSQHKFACNVVQKCVTHASRTERAVLIDEVCTMNDGPHSAL YTMMKDQYASYVVRKMIDVAEPGQRKIVMHKIRPHIATLRKYTYGKHILAKLEKYYMKNG VDLG (SEQ ID NO: 482). In some aspects, SEQ ID NO: 482 comprises an architecture proceeding from the N-terminus to the C-terminus according to: R1′-R1-R2-R3-R4-R5-R6-R1-R2-R3-R4-R5-R6-R7-R8-R8′. In some aspects, SEQ ID NO: 482 is comprised of the sequences detailed in Table 22.

TABLE 22
14PUF protein according to SEQ ID NO: 482

| PUF | SEQ | RNA | SEQ | | SEQ |
|---|---|---|---|---|---|
| | ID | Recog | ID | | ID |
| Module | NO | nition | NO | Amino Acid Sequence | NO |
| PUF R1′ | 495 | | 495 | GRSRLLEDFRNNRYPNLQ | 495 |
| | | | | LREIAG | |
| PUF R1 | 497 | A | 497 | HIMEFSQDQHGSRFIQLK | 497 |
| | | | | LERATPAERQLVFNEILQ | |
| PUF R2 | 492 | C | 492 | AAYQLMVDVFGSYVIRKF | 492 |
| | | | | FEFGSLEQKLALAERIRG | |
| PUF R3 | 507 | G | 507 | HVLSLALQMYGSRVIEKA | 507 |
| | | | | LEFIPSDQQNEMVRELDG | |
| PUF R4 | 503 | A | 503 | HVLKCVKDQNGCHVVQKC | 503 |
| | | | | IECVQPQSLQFIIDAFKG | |
| PUF R5 | 514 | C | 514 | QVFALSTHPYGSRVIRRI | 514 |
| | | | | LEHCLPDQTLPILEELHQ | |
| PUF R6 | 501 | G | 501 | HTEQLVQDQYGSYVIEHV | 501 |
| | | | | LEHGRPEDKSKIVAEIRG | |
| PUF R1 | 497 | A | 497 | HIMEFSQDQHGSRFIQLK | 497 |
| | | | | LERATPAERQLVFNEILQ | |
| PUF R2 | 492 | C | 492 | AAYQLMVDVFGSYVIRKF | 492 |
| | | | | FEFGSLEQKLALAERIRG | |
| PUF R3 | 507 | G | 507 | HVLSLALQMYGSRVIEKA | 507 |
| | | | | LEFIPSDQQNEMVRELDG | |
| PUF R4 | 503 | A | 503 | HVLKCVKDQNGCHVVQKC | 503 |
| | | | | IECVQPQSLQFIIDAFKG | |
| PUF R5 | 514 | C | 514 | QVFALSTHPYGSR VIRR | 514 |
| | | | | ILEHCLPDQTLPILEELH | |
| | | | | Q | |
| PUF R6 | 501 | G | 501 | HTEQLVQDQYGSYVIEH | 501 |
| | | | | VLEHGRPEDKSKIVAEIR | |
| | | | | G | |
| PUF R7 | 509 | A | 509 | NVLVLSQHKFACNVVQKC | 509 |
| | | | | VTHASRTERAVLIDEVCT | |
| | | | | MND | |
| | | | | GPHS | |
| PUF R8 | 494 | C | 494 | ALYTMMKDQYASYVVRKM | 494 |
| | | | | IDVAEPGQRKIVMHKIRP | |
| PUF R8′ | 496 | | 496 | HIATLRKYTYGKHILAKL | 496 |
| | | | | EKYYMKNGVDLG | |

[0678] An exemplary 15-mer RNA recognition (15PUF) targeting CAGCAGCAGCAGCAG (SEQ ID NO: 455) comprises the amino acid sequence: GRSRLLEDFRNNRYPNLQLREIAGHIMEFSQDQHGSRFIELKLERATPAERQLVFNEILQAAY QLMVDVFGCYVIQKFFEFGSLEQKLALAERIRGHVLSLALQMYGSYVIRKALEFIPSDQQNE MVRELDGHVLKCVKDQNGSYVVEKCIECVQPQSLQFIIDAFKGQVFALSTHPYGCRVIQRILE HCLPDQTLPILEELHQHIMEFSQDQHGSRFIRLKLERATPAERQLVFNEILQAAYQLMVDVFG SYVIEKFFEFGSLEQKLALAERIRGHVLSLALQMYGCRVIQKALEFIPSDQQNEMVRELDGHV LKCVKDQNGSYVVRKCIECVQPQSLQFIIDAFKGQVFALSTHPYGSRVIERILEHCLPDQTLPI LEELHQHTEQLVQDQYGCYVIQHVLEHGRPEDKSKIVAEIRGNVLVLSQHKFASYVVRKCVT HASRTERAVLIDEVCTMNDGPHSHTEQLVQDQYGSYVIEHVLEHGRPEDKSKIVAEIRGNVL VLSQHKFACNVVQKCVTHASRTERAVLIDEVCTMNDGPHSALYTMMKDQYASYVVRKMID VAEPGQRKIVMHKIRPHIATLRKYTYGKHILAKLEKYYMKNGVDLG (SEQ ID NO: 483). In some aspects, SEQ ID NO: 483 comprises an architecture proceeding from the N-terminus to the C-terminus according to: R1′-R1-R2-R3-R4-R5-R1-R2-R3-R4-R5-R6-R7-R6-R7-R8-R8′. In some aspects, SEQ ID NO: 483 is comprised of the sequences detailed in Table 23.

TABLE 23
15PUF protein according to SEQ ID NO: 483

| | SEQ | RNA | SEQ | | SEQ |
|---|---|---|---|---|---|
| PUF | ID | Recog | ID | | ID |
| Module | NO | nition | NO | Amino Acid Sequence | NO |
| PUF R1′ | 495 | | 495 | GRSRLLEDFRNNRYPNLQ | 495 |
| | | | | LREIAG | |
| R1 | 498 | G | 498 | HIMEFSQDQHGSRFIELK | 498 |
| | | | | LERATPAERQLVFNEILQ | |
| R2 | 490 | A | 490 | AAYQLMVDVFGCYVIQKF | 490 |
| | | | | FEFGSLEQKLALAERIRG | |
| R3 | 508 | C | 508 | HVLSLALQMYGSYVIRKA | 508 |
| | | | | LEFIPSDQQNEMVRELDG | |
| R4 | 504 | G | 504 | HVLKCVKDQNGSYVVEKC | 504 |
| | | | | IECVQPQSLQFIIDAFKG | |
| R5 | 512 | A | 512 | QVFALSTHPYGCRVIQRI | 512 |
| | | | | LEHCLPDQTLPILEELHQ | |
| RI | 499 | C | 499 | HIMEFSQDQHGSRFIRLK | 499 |
| | | | | LERATPAERQLVFNEILQ | |
| R2 | 491 | G | 491 | AAYQLMVDVFGSYVIEKF | 491 |
| | | | | FEFGSLEQKLALAERIRG | |
| R3 | 506 | A | 506 | HVLSLALQMYGCRVIQKA | 506 |
| | | | | LEFIPSDQQNEMVRELDG | |
| R4 | 505 | C | 505 | HVLKCVKDQNGSYVVRKC | 505 |
| | | | | IECVQPQSLQFIIDAFKG | |
| R5 | 513 | G | 513 | QVFALSTHPYGSRVIERI | 513 |
| | | | | LEHCLPDQTLPILEELHQ | |
| R6 | 500 | A | 500 | HTEQLVQDQYGCYVIQHV | 500 |
| | | | | LEHGRPEDKSKIVAEIRG | |
| R7 | 511 | C | 511 | NVLVLSQHKFASYVVRKC | 511 |
| | | | | VTHASRTERAVLIDEVCT | |
| | | | | MNDGPHS | |
| R6 | 501 | G | 501 | HTEQLVQDQYGSYVIEHV | 501 |
| | | | | LEHGRPEDKSKIVAEIRG | |
| R7 | 509 | A | 509 | NVLVLSQHKFACNVVQKC | 509 |
| | | | | VTHASRTERAVLIDEVCT | |
| | | | | MNDGPHS | |
| R8 | 494 | C | 494 | ALYTMMKDQYASYVVRKM | 494 |
| | | | | IDVAEPGQRKIVMHKIRP | |
| PUF R8′ | 496 | | 496 | HIATLRKYTYGKHILAKL | 496 |
| | | | | EKYYMKNGVDLG | |

[0679] An exemplary 15-mer RNA recognition (15PUF) targeting CAGCAGCAGCAGCAG (SEQ ID NO: 455) comprises the amino acid sequence: GRSRLLEDFRNNRYPNLQLREIAGHIMEFSQDQHGSRFIELKLERATPAERQLVFNEILQAAY QLMVDVFGCYVIQKFFEFGSLEQKLALAERIRGHVLSLALQMYGSYVIRKALEFIPSDQQNE MVRELDGHVLKCVKDQNGSYVVEKCIECVQPQSLQFIIDAFKGQVFALSTHPYGCRVIQRILE HCLPDQTLPILEELHQHTEQLVQDQYGSYVIRHVLEHGRPEDKSKIVAEIRGHIMEFSQDQHG SRFIELKLERATPAERQLVFNEILQAAYQLMVDVFGCYVIQKFFEFGSLEQKLALAERIRGHV LSLALQMYGSYVIRKALEFIPSDQQNEMVRELDGHVLKCVKDQNGSYVVEKCIECVQPQSL QFIIDAFKGQVFALSTHPYGCRVIQRILEHCLPDQTLPILEELHQHTEQLVQDQYGSYVIRHVL EHGRPEDKSKIVAEIRGNVLVLSQHKFASNVVEKCVTHASRTERAVLIDEVCTMNDGPHSNV LVLSQHKFACNVVQKCVTHASRTERAVLIDEVCTMNDGPHSALYTMMKDQYASYVVRKMI DVAEPGQRKIVMHKIRPHIATLRKYTYGKHILAKLEKYYMKNGVDLG (SEQ ID NO: 484). In some aspects, SEQ ID NO: 484 comprises an architecture proceeding from the N-terminus to the C-terminus according to: R1′-R1-R2-R3-R4-R5-R6-R1-R2-R3-R4-R5-R6-R7-R7-R8-R8′. In some aspects, SEQ ID NO: 484 is comprised of the sequences detailed in Table 24.

TABLE 24
15PUF protein according to SEQ ID NO: 484

| | RNA | | SEQ |
|---|---|---|---|
| PUF | Recog | | ID |
| Module | nition | Amino Acid Sequence | NO |
| PUF R1′ | | HIMEFSQDQHGSRFIELKLERATPAERQLVFNEILQ | 498 |
| R1 | G | AAYQLMVDVFGCYVIQKFFEFGSLEQKLALAERIRG | 498 |
| R2 | A | HVLSLALQMYGSYVIRKALEFIPSDQQNEMVRELDG | 490 |
| R3 | C | HVLKCVKDQNGSYVVEKCIECVQPQSLQFIIDAFKG | 508 |
| R4 | G | QVFALSTHPYGCRVIQRILEHCLPDQTLPILEELHQ | 504 |
| R5 | A | HTEQLVQDQYGSYVIRHVLEHGRPEDKSKIVAEIRG | 512 |
| R6 | C | HIMEFSQDQHGSRFIELKLERATPAERQLVFNEILQ | 498 |
| R1 | G | AAYQLMVDVFGCYVIQKFFEFGSLEQKLALAERIRG | 498 |
| R2 | A | HVLSLALQMYGSYVIRKALEFIPSDQQNEMVRELDG | 490 |
| R3 | C | HVLKCVKDQNGSYVVEKCIECVQPQSLQFIIDAFKG | 508 |
| R4 | G | QVFALSTHPYGCRVIQRILEHCLPDQTLPILEELHQ | 504 |
| R5 | A | HTEQLVQDQYGSYVIRHVLEHGRPEDKSKIVAEIRG | 512 |
| R6 | C | NVLVLSQHKFASNVVEKCVTHASRTERAVLIDEVCT | 502 |
| | | MNDGPHS | |
| R7 | G | NVLVLSQHKFACNVVQKCVTHASRTERAVLIDEVCT | 510 |
| | | MNDGPHS | |
| R7 | A | ALYTMMKDQYASYVVRKMIDVAEPGQRKIVMHKIRP | 509 |
| R8 | C | HIATLRKYTYGKHILAKLEKYYMKNGVDLG | 496 |
| PUF R8′ | | HIMEFSQDQHGSRFIELKLERATPAERQLVFNEILQ | 498 |

[0680] An exemplary 15-mer RNA recognition (15PUF) targeting CAGCAGCAGCAGCAG (SEQ ID NO: 455) comprises the amino acid sequence: GRSRLLEDFRNNRYPNLQLREIAGHIMEFSQDQHGSRFIELKLERATPAERQLVFNEILQAAY QLMVDVFGCYVIQKFFEFGSLEQKLALAERIRGHVLSLALQMYGSYVIRKALEFIPSDQQNE MVRELDGHVLKCVKDQNGSYVVEKCIECVQPQSLQFIIDAFKGQVFALSTHPYGCRVIQRILE HCLPDQTLPILEELHQHTEQLVQDQYGSYVIRHVLEHGRPEDKSKIVAEIRGNVLVLSQHKFA SNVVEKCVTHASRTERAVLIDEVCTMNDGPHSHIMEFSQDQHGSRFIQLKLERATPAERQLV FNEILQAAYQLMVDVFGSYVIRKFFEFGSLEQKLALAERIRGHVLSLALQMYGSRVIEKALEF IPSDQQNEMVRELDGHVLKCVKDQNGCHVVQKCIECVQPQSLQFIIDAFKGQVFALSTHPYG SRVIRRILEHCLPDQTLPILEELHQHTEQLVQDQYGSYVIEHVLEHGRPEDKSKIVAEIRGNVL VLSQHKFACNVVQKCVTHASRTERAVLIDEVCTMNDGPHSALYTMMKDQYASYVVRKMID VAEPGQRKIVMHKIRPHIATLRKYTYGKHILAKLEKYYMKNGVDLG (SEQ ID NO: 485). In some aspects, SEQ ID NO: 485 comprises an architecture proceeding from the N-terminus to the C-terminus according to: R1′-R1-R2-R3-R4-R5-R6-R7-R1-R2-R3-R4-R5-R6-R7-R8-R8′. In some aspects, SEQ ID NO: 485 is comprised of the sequences detailed in Table 25.

TABLE 25
15PUF protein according to SEQ ID NO: 485

| PUF | RNA | | SEQ |
|---|---|---|---|
| Module | Recognition | Amino Acid Sequence | ID NO |
| PUF R1′ | | GRSRLLEDFRNNRYPNLQ | 495 |
| | | LREIAG | |
| R1 | G | HIMEFSQDQHGSRFIELK | 498 |
| | | LERATPAERQLVFNEILQ | |
| R2 | A | AAYQLMVDVFGCYVIQKF | 490 |
| | | FEFGSLEQKLALAERIRG | |
| R3 | C | HVLSLALQMYGSYVIRKA | 508 |
| | | LEFIPSDQQNEMVRELDG | |
| R4 | G | HVLKCVKDQNGSYVVEKC | 504 |
| | | IECVQPQSLQFIIDAFKG | |
| R5 | A | QVFALSTHPYGCRVIQRI | 512 |
| | | LEHCLPDQTLPILEELHQ | |
| R6 | C | HTEQLVQDQYGSYVIRHV | 502 |
| | | LEHGRPEDKSKIVAEIRG | |
| R7 | G | NVLVLSQHKFASNVVEKC | 510 |
| | | VTHASRTERAVLIDEVCT | |
| | | MNDGPHS | |
| R1 | A | HIMEFSQDQHGSRFIQLK | 497 |
| | | LERATPAERQLVFNEILQ | |
| R2 | C | AAYQLMVDVFGSYVIRKF | 492 |
| | | FEFGSLEQKLALAERIRG | |
| R3 | G | HVLSLALQMYGSRVIEKA | 507 |
| | | LEFIPSDQQNEMVRELDG | |
| R4 | A | HVLKCVKDQNGCHVVQKC | 503 |
| | | IECVQPQSLQFIIDAFKG | |
| R5 | C | QVFALSTHPYGSRVIRRI | 514 |
| | | LEHCLPDQTLPILEELHQ | |
| R6 | G | HTEQLVQDQYGSYVIEHV | 501 |
| | | LEHGRPEDKSKIVAEIRG | |
| R7 | A | NVLVLSQHKFACNVVQKC | 509 |
| | | VTHASRTERAVLIDEVCT | |
| | | MNDGPHS | |
| R& | C | ALYTMMKDQYASYVVRKM | 494 |
| | | IDVAEPGQRKIVMHKIRP | |
| PUF R8′ | | HIATLRKYTYGKHILAKL | 496 |
| | | EKYYMKNGVDLG | |

[0681] An exemplary 16-mer RNA recognition (16PUF) targeting CAGCAGCAGCAGCAGC (SEQ ID NO: 456) comprises the amino acid sequence: GRSRLLEDFRNNRYPNLQLREIAGHIMEFSQDQHGSRFIRLKLERATPAERQLVFNEILQAAY QLMVDVFGSYVIEKFFEFGSLEQKLALAERIRGHVLSLALQMYGCRVIQKALEFIPSDQQNE MVRELDGHVLKCVKDQNGSYVVRKCIECVQPQSLQFIIDAFKGQVFALSTHPYGSRVIERILE HCLPDQTLPILEELHQHIMEFSQDQHGSRFIQLKLERATPAERQLVFNEILQAAYQLMVDVFG SYVIRKFFEFGSLEQKLALAERIRGHVLSLALQMYGSRVIEKALEFIPSDQQNEMVRELDGHV LKCVKDQNGCHVVQKCIECVQPQSLQFIIDAFKGQVFALSTHPYGSRVIRRILEHCLPDQTLPI LEELHQHTEQLVQDQYGSYVIEHVLEHGRPEDKSKIVAEIRGNVLVLSQHKFACNVVQKCVT HASRTERAVLIDEVCTMNDGPHSALYTMMKDQYASYVVRKMIDVAEPGQRKIVMHKIRPH TEQLVQDQYGSYVIEHVLEHGRPEDKSKIVAEIRGNVLVLSQHKFACNVVQKCVTHASRTER AVLIDEVCTMNDGPHSALYTMMKDQYASYVVRKMIDVAEPGQRKIVMHKIRPHIATLRKYT YGKHILAKLEKYYMKNGVDLG (SEQ ID NO: 486). In some aspects, SEQ ID NO: 486 comprises an architecture proceeding from the N-terminus to the C-terminus according to: R1′-R1-R2-R3-R4-R5-R1-R2-R3-R4-R5-R6-R7-R8-R6-R7-R8-R8′. In some aspects, SEQ ID NO: 486 is comprised of the sequences detailed in Table 26.

TABLE 26
16PUF protein according to SEQ ID NO: 486

| PUF | RNA | | SEQ |
|---|---|---|---|
| Module | Recognition | Amino Acid Sequence | ID NO |
| PUF R1′ | | GRSRLLEDFRNNRYPNLQ | 495 |
| | | LREIAG | |
| R1 | C | HIMEFSQDQHGSRFIRLK | 499 |
| | | LERATPAERQLVFNEILQ | |
| R2 | G | AAYQLMVDVFGSYVIEKF | 491 |
| | | FEFGSLEQKLALAERIRG | |
| R3 | A | HVLSLALQMYGCRVIQKA | 506 |
| | | LEFIPSDQQNEMVRELDG | |
| R4 | C | HVLKCVKDQNGSYVVRKC | 505 |
| | | IECVQPQSLQFIIDAFKG | |
| R5 | G | QVFALSTHPYGSRVIERI | 513 |
| | | LEHCLPDQTLPILEELHQ | |
| R1 | A | HIMEFSQDQHGSRFIQLK | 497 |
| | | LERATPAERQLVFNEILQ | |
| R2 | C | AAYQLMVDVFGSYVIRKF | 492 |
| | | FEFGSLEQKLALAERIRG | |
| R3 | G | HVLSLALQMYGSRVIEKA | 507 |
| | | LEFIPSDQQNEMVRELDG | |
| R4 | A | HVLKCVKDQNGCHVVQKC | 503 |
| | | IECVQPQSLQFIIDAFKG | |
| R5 | C | QVFALSTHPYGSRVIRRI | 514 |
| | | LEHCLPDQTLPILEELHQ | |
| R6 | G | HTEQLVQDQYGSYVIEHV | 51 |
| | | LEHGRPEDKSKIVAEIRG | |
| R7 | A | NVLVLSQHKFACNVVQKC | 509 |
| | | VTHASRTERAVLIDEVCT | |
| | | MNDGPHS | |
| R8 | C | ALYTMMKDQYASYVVRKM | 494 |
| | | IDVAEPGQRKIVMHKIRP | |
| R6 | G | HTEQLVQDQYGSYVIEHV | 501 |
| | | LEHGRPEDKSKIVAEIRG | |
| R7 | A | NVLVLSQHKFACNVVQKC | 509 |
| | | VTHASRTERAVLIDEVCT | |
| | | MNDGPHS | |
| R8 | C | ALYTMMKDQYASYVVRKM | 494 |
| | | IDVAEPGQRKIVMHKIRP | |
| PUF R8′ | | HIATLRKYTYGKHILAKL | 496 |
| | | EKYYMKNGVDLG | |

[0682] An exemplary 16-mer RNA recognition (16PUF) targeting CAGCAGCAGCAGCAGC (SEQ ID NO: 456) comprises the amino acid sequence: GRSRLLEDFRNNRYPNLQLREIAGHIMEFSQDQHGSRFIRLKLERATPAERQLVFNEIL QAAYQLMVDVFGSYVIEKFFEFGSLEQKLALAERIRGHVLSLALQMYGCRVIQKALE FIPSDQQNEMVRELDGHVLKCVKDQNGSYVVRKCIECVQPQSLQFIIDAFKGQVFAL STHPYGSRVIERILEHCLPDQTLPILEELHQHTEQLVQDQYGCYVIQHVLEHGRPEDK SKIVAEIRGHIMEFSQDQHGSRFIRLKLERATPAERQLVFNEILQAAYQLMVDVFGSY VIEKFFEFGSLEQKLALAERIRGHVLSLALQMYGCRVIQKALEFIPSDQQNEMVRELD GHVLKCVKDQNGSYVVRKCIECVQPQSLQFIIDAFKGQVFALSTHPYGSRVIERILEH CLPDQTLPILEELHQHTEQLVQDQYGCYVIQHVLEHGRPEDKSKIVAEIRGNVLVLSQ HKFASYVVRKCVTHASRTERAVLIDEVCTMNDGPHSALYTMMKDQYASYVVEKMI DVAEPGQRKIVMHKIRPNVLVLSQHKFACNVVQKCVTHASRTERAVLIDEVCTMND GPHSALYTMMKDQYASYVVRKMIDVAEPGQRKIVMHKIRPHIATLRKYTYGKHILA KLEKYYMKNGVDLG (SEQ ID NO: 487). In some aspects, SEQ ID NO: 487 comprises an architecture proceeding from the N-terminus to the C-terminus according to: R1′-R1-R2-R3-R4-R5-R6-R1-R2-R3-R4-R5-R6-R7-R8-R7-R8-R8′. In some aspects, SEQ ID NO: 487 is comprised of the sequences detailed in Table 27.

TABLE 27
16PUF protein according to SEQ ID NO: 487

| PUF | RNA | | SEQ |
|---|---|---|---|
| Module | Recognition | Amino Acid Sequence | ID NO |
| PUF R1′ | | GRSRLLEDFRNNRYPNLQ | 495 |
| | | LREIAG | |
| R1 | C | HIMEFSQDQHGSRFIRLK | 499 |
| | | LERATPAERQLVFNEILQ | |
| R2 | G | AAYQLMVDVFGSYVIEKF | 491 |
| | | FEFGSLEQKLALAERIRG | |
| R3 | A | HVLSLALQMYGCRVIQKA | 506 |
| | | LEFIPSDQQNEMVRELDG | |
| R4 | C | HVLKCVKDQNGSYVVRKC | 55 |
| | | IECVQPQSLQFIIDAFKG | |
| R5 | G | QVFALSTHPYGSRVIERI | 513 |
| | | LEHCLPDQTLPILEELHQ | |
| R6 | A | HTEQLVQDQYGCYVIQHV | 500 |
| | | LEHGRPEDKSKIVAEIRG | |
| R1 | C | HIMEFSQDQHGSRFIRLK | 499 |
| | | LERATPAERQLVFNEILQ | |
| R2 | G | AAYQLMVDVFGSYVIEKF | 491 |
| | | FEFGSLEQKLALAERIRG | |
| R3 | A | HVLSLALQMYGCRVIQKA | 506 |
| | | LEFIPSDQQNEMVRELDG | |
| R4 | C | HVLKCVKDQNGSYVVRKC | 505 |
| | | IECVQPQSLQFIIDAFKG | |
| R5 | G | QVFALSTHPYGSRVIERI | 513 |
| | | LEHCLPDQTLPILEELHQ | |
| R6 | A | HTEQLVQDQYGCYVIQHV | 500 |
| | | LEHGRPEDKSKIVAEIRG | |
| R7 | C | NVLVLSQHKFASYVVRKC | 511 |
| | | VTHASRTERAVLIDEVCT | |
| | | MNDGPHS | |
| R8 | G | ALYTMMKDQYASYVVEKM | 489 |
| | | IDVAEPGQRKIVMHKIRP | |
| R7 | A | NVLVLSQHKFACNVVQKC | 509 |
| | | VTHASRTERAVLIDEVCT | |
| | | MNDGPHS | |
| R8 | C | ALYTMMKDQYASYVVRKM | 494 |
| | | IDVAEPGQRKIVMHKIRP | |
| PUF R8′ | | HIATLRKYTYGKHILAKL | 496 |
| | | EKYYMKNGVDLG | |

[0683] An exemplary 16-mer RNA recognition 16PUF targeting CAGCAGCAGCAGCAGC (SEQ ID NO: 456) comprises the amino acid sequence: GRSRLLEDFRNNRYPNLQLREIAGHIMEFSQDQHGSRFIRLKLERATPAERQLVFNEILQAAY QLMVDVFGSYVIEKFFEFGSLEQKLALAERIRGHVLSLALQMYGCRVIQKALEFIPSDQQNE MVRELDGHVLKCVKDQNGSYVVRKCIECVQPQSLQFIIDAFKGQVFALSTHPYGSRVIERILE HCLPDQTLPILEELHQHTEQLVQDQYGCYVIQHVLEHGRPEDKSKIVAEIRGNVLVLSQHKFA SYVVRKCVTHASRTERAVLIDEVCTMNDGPHSALYTMMKDQYASYVVEKMIDVAEPGQRK IVMHKIRPHIMEFSQDQHGSRFIQLKLERATPAERQLVFNEILQAAYQLMVDVFGSYVIRKFF EFGSLEQKLALAERIRGHVLSLALQMYGSRVIEKALEFIPSDQQNEMVRELDGHVLKCVKDQ NGCHVVQKCIECVQPQSLQFIIDAFKGQVFALSTHPYGSRVIRRILEHCLPDQTLPILEELHQH TEQLVQDQYGSYVIEHVLEHGRPEDKSKIVAEIRGNVLVLSQHKFACNVVQKCVTHASRTER AVLIDEVCTMNDGPHSALYTMMKDQYASYVVRKMIDVAEPGQRKIVMHKIRPHIATLRKYT YGKHILAKLEKYYMKNGVDLG (SEQ ID NO: 488). In some aspects, SEQ ID NO: 488 comprises an architecture proceeding from the N-terminus to the C-terminus according to: R1′-R1-R2-R3-R4-R5-R6-R7-R8-R1-R2-R3-R4-R5-R6-R7-R8-R8′. In some aspects, SEQ ID NO: 488 is comprised of the sequences detailed in Table 28.

TABLE 28
16PUF protein according to SEQ ID NO: 488

| PUF | RNA | | SEQ |
|---|---|---|---|
| Module | Recognition | Amino Acid Sequence | ID NO |
| PUF R1′ | | HIMEFSQDQHGSRFIRLK | 499 |
| | | LERATPAERQLVFNEILQ | |
| R1 | C | AAYQLMVDVFGSYVIEKF | 491 |
| | | FEFGSLEQKLALAERIRG | |
| R2 | G | HVLSLALQMYGCRVIQKA | 507 |
| | | LEFIPSDQQNEMVRELDG | |
| R3 | A | HVLKCVKDQNGSYVVRKC | 503 |
| | | IECVQPQSLQFIIDAFKG | |
| | C | QVFALSTHPYGSRVIERI | 514 |
| R4 | | LEHCLPDQTLPILEELHQ | |
| R5 | G | HTEQLVQDQYGCYVIQHV | 501 |
| | | LEHGRPEDKSKIVAEIRG | |
| R6 | A | NVLVLSQHKFASYVVRKC | 509 |
| | | VTHASRTERAVLIDEVCT | |
| | | MNDGPHS | |
| R7 | C | ALYTMMKDQYASYVVEKM | 494 |
| | | IDVAEPGQRKIVMHKIRP | |
| R8 | G | HIMEFSQDQHGSRFIQLK | 498 |
| | | LERATPAERQLVFNEILQ | |
| R1 | A | AAYQLMVDVFGSYVIRKF | 491 |
| | | FEFGSLEQKLALAERIRG | |
| R2 | C | HVLSLALQMYGSRVIEKA | 507 |
| | | LEFIPSDQQNEMVRELDG | |
| R3 | G | HVLKCVKDQNGCHVVQKC | 503 |
| | | IECVQPQSLQFIIDAFKG | |
| R4 | A | QVFALSTHPYGSRVIRRI | 514 |
| | | LEHCLPDQTLPILEELHQ | |
| R5 | C | HTEQLVQDQYGSYVIEHV | 501 |
| | | LEHGRPEDKSKIVAEIRG | |
| R6 | G | NVLVLSQHKFACNVVQKC | 509 |
| | | VTHASRTERAVLIDEVCT | |
| | | MNDGPHS | |
| R7 | A | ALYTMMKDQYASYVVRKM | 494 |
| | | IDVAEPGQRKIVMHKIRP | |
| R8 | C | HIATLRKYTYGKHILAKL | 496 |
| | | EKYYMKNGVDLG | |
| PUF R8′ | | HIMEFSQDQHGSRFIRLK | 499 |
| | | LERATPAERQLVFNEILQ | |

[0684] An exemplary 8-mer RNA recognition (8PUF) targeting GCAGCAGC (SEQ ID NO: 476) comprises the amino acid sequence: GRS RLLEDFRNNRYPNLQLREIAGHIMEFSQDQHGSRFIRLKLERATPAERQLVFNEIL QAAYQLMVDVFGSYVIEKFFEFGSLEQKLALAERIRGHVLSLALQMYGCRVIQKALE FIPSDQQNEMVRELDGHVLKCVKDQNGSYVVRKCIECVQPQSLQFIIDAFKGQVFAL STHPYGSRVIERILEHCLPDQTLPILEELHQHTEQLVQDQYGCYVIQHVLEHGRPEDK SKIVAEIRGNVLVLSQHKFASYVVRKCVTHASRTERAVLIDEVCTMNDGPHSALYT MMKDQYASYVVEKMIDVAEPGQRKIVMHKIRPHIATLRKYTYGKHILAKLEKYYM KNGVDLG (SEQ ID NO: 549). In some aspects, SEQ ID NO: 549 comprises an architecture proceeding from the N-terminus to the C-terminus according to: R1′-R1-R2-R3-R4-R5-R6-R7-R8-R8′. In some aspects, SEQ ID NO: 549 is comprised of the sequences detailed in Table 29.

TABLE 29
8PUF protein according to SEQ ID NO: 549

| PUF | RNA | | SEQ |
|---|---|---|---|
| Module | Recognition | Amino Acid Sequence | ID NO |
| PUF R1′ | | GRSRLLEDFRNNRYPNLQ | 495 |
| | | LREIAG | |
| R1 | C | HIMEFSQDQHGSRFIRLK | 499 |
| | | LERATPAERQLVFNEILQ | |
| R2 | G | AAYQLMVDVFGSYVIEKF | 491 |
| | | FEFGSLEQKLALAERIRG | |
| R3 | A | HVLSLALQMYGCRVIQKA | 506 |
| | | LEFIPSDQQNEMVRELDG | |
| R4 | C | HVLKCVKDQNGSYVVRKC | 505 |
| | | IECVQPQSLQFIIDAFKG | |
| R5 | G | QVFALSTHPYGSRVIERI | 513 |
| | | LEHCLPDQTLPILEELHQ | |
| R6 | A | HTEQLVQDQYGCYVIQHV | 500 |
| | | LEHGRPEDKSKIVAEIRG | |
| R7 | C | NVLVLSQHKFASYVVRKC | 511 |
| | | VTHASRTERAVLIDEVCT | |
| | | MNDGPHS | |
| R8 | G | ALYTMMKDQYASYVVEKM | 489 |
| | | IDVAEPGQRKIVMHKIRP | |
| PUF R8′ | | HIATLRKYTYGKHILAKL | 496 |
| | | EKYYMKNGVDLG | |

[0685] An exemplary 14-mer RNA recognition (14PUF) targeting GCAGCAGCAGCAGC (SEQ ID NO: 477) comprises the amino acid sequence: GRSRLLEDFRNNRYPNLQLREIAGHIMEFSQDQHGSRFIRLKLERATPAERQLVFNEIL QAAYQLMVDVFGSYVIEKFFEFGSLEQKLALAERIRGHVLSLALQMYGCRVIQKALE FIPSDQQNEMVRELDGHVLKCVKDQNGSYVVRKCIECVQPQSLQFIIDAFKGQVFAL STHPYGSRVIERILEHCLPDQTLPILEELHQHTEQLVQDQYGCYVIQHVLEHGRPEDK SKIVAEIRGNVLVLSQHKFASYVVRKCVTHASRTERAVLIDEVCTMNDGPHSALYT MMKDQYASYVVEKMIDVAEPGQRKIVMHKIRPHIATLRKYTYGKHILAKLEKYYM KNGVDLG (SEQ ID NO: 550). In some aspects, SEQ ID NO: 550 comprises an architecture proceeding from the N-terminus to the C-terminus according to: R1′-R1-R2-R3-R4-R5-R1-R2-R3-R4-R5-R6-R6-R7-R8-R8′. In some aspects, SEQ ID NO: 550 is comprised of the sequences detailed in Table 30.

TABLE 30
14PUF protein according to SEQ ID NO: 550

| PUF | RNA | | SEQ |
|---|---|---|---|
| Module | Recognition | Amino Acid Sequence | ID NO |
| PUF R1′ | | GRSRLLEDFRNNRYPNLQ | 495 |
| | | LREIAG | |
| R1 | C | HIMEFSQDQHGSRFIRLK | 499 |
| | | LERATPAERQLVFNEILQ | |
| R2 | G | AAYQLMVDVFGSYVIEKF | 491 |
| | | FEFGSLEQKLALAERIRG | |
| R3 | A | HVLSLALQMYGCRVIQKA | 506 |
| | | LEFIPSDQQNEMVRELDG | |
| R4 | C | HVLKCVKDQNGSHVVRKC | 505 |
| | | IECVQPQSLQFIIDAFKG | |
| R5 | G | QVFALSTHPYGSRVIERI | 513 |
| | | LEHCLPDQTLPILEELHQ | |
| R1 | A | HIMEFSQDQHGSRFIQLK | 497 |
| | | LERATPAERQLVFNEILQ | |
| R2 | C | AAYQLMVDVFGSYVIRKF | 492 |
| | | FEFGSLEQKLALAERIRG | |
| R3 | G | HVLSLALQMYGSRVIEKA | 507 |
| | | LEFIPSDQQNEMVRELDG | |
| R4 | A | HVLKCVKDQNGCHVVQKC | 503 |
| | | IECVQPQSLQFIIDAFKG | |
| R5 | C | QVFALSTHPYGSRVIRRI | 514 |
| | | LEHCLPDQTLPILEELHQ | |
| R6 | G | HTEQLVQDQYGSYVIEHV | 501 |
| | | LEHGRPEDKSKIVAEIRG | |
| R6 | A | HTEQLVQDQYGCYVIQHV | 500 |
| | | LEHGRPEDKSKIVAEIRG | |
| R7 | C | NVLVLSQHKFASYVVRKC | 511 |
| | | VTHASRTERAVLIDEVCT | |
| | | MNDGPHS | |
| R8 | G | ALYTMMKDQYASYVVEKM | 489 |
| | | IDVAEPGQRKIVMHKIRP | |
| PUF R8′ | | HIATLRKYTYGKHILAKL | 496 |
| | | EKYYMKNGVDLG | |

[0686] An exemplary 14-mer RNA recognition (14PUF) targeting GCAGCAGCAGCAGC (SEQ ID NO: 477) comprises the amino acid sequence: GRSRLLEDFRNNRYPNLQLREIAGHIMEFSQDQHGSRFIRLKLERATPAERQLVFNEILQAAY QLMVDVFGSYVIEKFFEFGSLEQKLALAERIRGHVLSLALQMYGCRVIQKALEFIPSDQQNE MVRELDGHVLKCVKDQNGSHVVRKCIECVQPQSLQFIIDAFKGQVFALSTHPYGSRVIERILE HCLPDQTLPILEELHQHTEQLVQDQYGCYVIQHVLEHGRPEDKSKIVAEIRGHIMEFSQDQHG SRFIRLKLERATPAERQLVFNEILQAAYQLMVDVFGSYVIEKFFEFGSLEQKLALAERIRGHVL SLALQMYGCRVIQKALEFIPSDQQNEMVRELDGHVLKCVKDQNGSHVVRKCIECVQPQSLQ FIIDAFKGQVFALSTHPYGSRVIERILEHCLPDQTLPILEELHQHTEQLVQDQYGCYVIQHVLE HGRPEDKSKIVAEIRGNVLVLSQHKFASYVVRKCVTHASRTERAVLIDEVCTMNDGPHSALY TMMKDQYASYVVEKMIDVAEPGQRKIVMHKIRPHIATLRKYTYGKHILAKLEKYYMKNGV DLG (SEQ ID NO: 551). In some aspects, SEQ ID NO: 551 comprises an architecture proceeding from the N-terminus to the C-terminus according to: R1′-R1-R2-R3-R4-R5-R6-R1-R2-R3-R4-R5-R6-R7-R8-R8′. In some aspects, SEQ ID NO: 551 is comprised of the sequences detailed in Table 31.

TABLE 31
14PUF protein according to SEQ ID NO: 551

| PUF | RNA | | SEQ |
|---|---|---|---|
| Module | Recognition | Amino Acid Sequence | ID NO |
| PUF R1′ | | GRSRLLEDFRNNRYPNLQ | 495 |
| | | LREIAG | |
| R1 | C | HIMEFSQDQHGSRFIRLK | 499 |
| | | LERATPAERQLVFNEILQ | |
| R2 | G | AAYQLMVDVFGSYVIEKF | 491 |
| | | FEFGSLEQKLALAERIRG | |
| R3 | A | HVLSLALQMYGCRVIQKA | 506 |
| | | LEFIPSDQQNEMVRELDG | |
| R4 | C | HVLKCVKDQNGSHVVRKC | 505 |
| | | IECVQPQSLQFIIDAFKG | |
| R5 | G | QVFALSTHPYGSRVIERI | 513 |
| | | LEHCLPDQTLPILEELHQ | |
| R6 | A | HTEQLVQDQYGCYVIQHV | 500 |
| | | LEHGRPEDKSKIVAEIRG | |
| R1 | C | HIMEFSQDQHGSRFIRLK | 499 |
| | | LERATPAERQLVFNEILQ | |
| R2 | G | AAYQLMVDVFGSYVIEKF | 491 |
| | | FEFGSLEQKLALAERIRG | |
| R3 | A | HVLSLALQMYGCRVIQKA | 506 |
| | | LEFIPSDQQNEMVRELDG | |
| R4 | C | HVLKCVKDQNGSHVVRKC | 505 |
| | | IECVQPQSLQFIIDAFKG | |
| R5 | G | QVFALSTHPYGSRVIERI | 513 |
| | | LEHCLPDQTLPILEELHQ | |
| R6 | A | HTEQLVQDQYGCYVIQHV | 500 |
| | | LEHGRPEDKSKIVAEIRG | |
| R7 | C | NVLVLSQHKFASYVVRKC | 511 |
| | | VTHASRTERAVLIDEVCT | |
| | | MNDGPHS | |
| R8 | G | ALYTMMKDQYASYVVEKM | 489 |
| | | IDVAEPGQRKIVMHKIRP | |
| PUF R8′ | | HIATLRKYTYGKHILAKL | 496 |
| | | EKYYMKNGVDLG | |

[0687] An exemplary 15-mer RNA recognition (15PUF) targeting GCAGCAGCAGCAGCA (SEQ ID NO: 478) comprises the amino acid sequence: GRSRLLEDFRNNRYPNLQLREIAGHIMEFSQDQHGSRFIQLKLERATPAERQLVFNEI LQAAYQLMVDVFGSYVIRKFFEFGSLEQKLALAERIRGHVLSLALQMYGSRVIEKAL EFIPSDQQNEMVRELDGHVLKCVKDQNGCHVVQKCIECVQPQSLQFIIDAFKGQVFA LSTHPYGSRVIRRILEHCLPDQTLPILEELHQHIMEFSQDQHGSRFIELKLERATPAERQ LVFNEILQAAYQLMVDVFGCYVIQKFFEFGSLEQKLALAERIRGHVLSLALQMYGSY VIRKALEFIPSDQQNEMVRELDGHVLKCVKDQNGSYVVEKCIECVQPQSLQFIIDAFK GQVFALSTHPYGCRVIQRILEHCLPDQTLPILEELHQHTEQLVQDQYGSYVIRHVLEH GRPEDKSKIVAEIRGNVLVLSQHKFASNVVEKCVTHASRTERAVLIDEVCTMNDGPH SHTEQLVQDQYGCYVIQHVLEHGRPEDKSKIVAEIRGNVLVLSQHKFASYVVRKCV THASRTERAVLIDEVCTMNDGPHSALYTMMKDQYASYVVEKMIDVAEPGQRKIVM HKIRPHIATLRKYTYGKHILAKLEKYYMKNGVDLG (SEQ ID NO: 552). In some aspects, SEQ ID NO: 552 comprises an architecture proceeding from the N-terminus to the C-terminus according to: R1′-R1-R2-R3-R4-R5-R1-R2-R3-R4-R5-R6-R7-R6-R7-R8-R8′. In some aspects, SEQ ID NO: 552 is comprised of the sequences detailed in Table 32.

TABLE 32
15PUF protein according to SEQ ID NO: 552

| PUF | RNA | | SEQ |
|---|---|---|---|
| Module | Recognition | Amino Acid Sequence | ID NO |
| PUF R1′ | — | GRSRLLEDFRNNRYPNLQLREIAG | 495 |
| R1 | A | HIMEFSQDQHGSRFIQLKLERATPAERQLVFNEILQ | 497 |
| R2 | C | AAYQLMVDVFGSYVIRKFFEFGSLEQKLALAERIRG | 492 |
| R3 | G | HVLSLALQMYGSRVIEKALEFIPSDQQNEMVRELDG | 507 |
| R4 | A | HVLKCVKDQNGCHVVQKCIECVQPQSLQFIIDAFKG | 503 |
| R5 | C | QVFALSTHPYGSRVIRRILEHCLPDQTLPILEELHQ | 514 |
| RI | G | HIMEFSQDQHGSRFIELKLERATPAERQLVFNEILQ | 498 |
| R2 | A | AAYQLMVDVFGCYVIQKFFEFGSLEQKLALAERIRG | 490 |
| R3 | C | HVLSLALQMYGSYVIRKALEFIPSDQQNEMVRELDG | 508 |
| R4 | G | HVLKCVKDQNGSYVVEKCIECVQPQSLQFIIDAFKG | 504 |
| R5 | A | QVFALSTHPYGCRVIQRILEHCLPDQTLPILEELHQ | 512 |
| R6 | C | HTEQLVQDQYGSYVIRHVLEHGRPEDKSKIVAEIRG | 502 |
| R7 | G | NVLVLSQHKFASNVVEKCVTHASRTERAVLIDEVCTMNDG | 510 |
| | | PHS | |
| R6 | A | HTEQLVQDQYGCYVIQHVLEHGRPEDKSKIVAEIRG | 500 |
| R7 | C | NVLVLSQHKFASYVVRKCVTHASRTERAVLIDEVCTMNDG | 511 |
| | | PHS | |
| R8 | G | ALYTMMKDQYASYVVEKMIDVAEPGQRKIVMHKIRP | 489 |
| PUF R8′ | — | HIATLRKYTYGKHILAKLEKYYMKNGVDLG | 496 |

[0688] An exemplary 15-mer RNA recognition (15PUF) targeting GCAGCAGCAGCAGCA (SEQ ID NO: 478) comprises the amino acid sequence: GRSRLLEDFRNNRYPNLQLREIAGHIMEFSQDQHGSRFIQLKLERATPAERQLVFNEI LQAAYQLMVDVFGSYVIRKFFEFGSLEQKLALAERIRGHVLSLALQMYGSRVIEKAL EFIPSDQQNEMVRELDGHVLKCVKDQNGCHVVQKCIECVQPQSLQFIIDAFKGQVFA LSTHPYGSRVIRRILEHCLPDQTLPILEELHQHTEQLVQDQYGSYVIEHVLEHGRPED KSKIVAEIRGHIMEFSQDQHGSRFIQLKLERATPAERQLVFNEILQAAYQLMVDVFGS YVIRKFFEFGSLEQKLALAERIRGHVLSLALQMYGSRVIEKALEFIPSDQQNEMVREL DGHVLKCVKDQNGCHVVQKCIECVQPQSLQFIIDAFKGQVFALSTHPYGSRVIRRILE HCLPDQTLPILEELHQHTEQLVQDQYGSYVIEHVLEHGRPEDKSKIVAEIRGNVLVLS QHKFACNVVQKCVTHASRTERAVLIDEVCTMNDGPHSNVLVLSQHKFASYVVRKC VTHASRTERAVLIDEVCTMNDGPHSALYTMMKDQYASYVVEKMIDVAEPGQRKIV MHKIRPHIATLRKYTYGKHILAKLEKYYMKNGVDLG (SEQ ID NO: 553). In some aspects, SEQ ID NO: 553 comprises an architecture proceeding from the N-terminus to the C-terminus according to: R1′-R1-R2-R3-R4-R5-R6-R1-R2-R3-R4-R5-R6-R7-R7-R8-R8′. In some aspects, SEQ ID NO: 553 is comprised of the sequences detailed in Table 33.

TABLE 33
15PUF protein according to SEQ ID NO: 553

| PUF | RNA | | SEQ |
|---|---|---|---|
| Module | Recognition | Amino Acid Sequence | ID NO |
| PUF R1′ | - | GRSRLLEDFRNNRYPNLQLREIAG | 495 |
| R1 | A | HIMEFSQDQHGSRFIQLKLERATPAERQLVFNEILQ | 497 |
| R2 | C | AAYQLMVDVFGSYVIRKFFEFGSLEQKLALAERIRG | 492 |
| R3 | G | HVLSLALQMYGSRVIEKALEFIPSDQQNEMVRELDG | 507 |
| R4 | A | HVLKCVKDQNGCHVVQKCIECVQPQSLQFIIDAFKG | 503 |
| R5 | C | QVFALSTHPYGSRVIRRILEHCLPDQTLPILEELHQ | 514 |
| R6 | G | HTEQLVQDQYGSYVIEHVLEHGRPEDKSKIVAEIRG | 501 |
| R1 | A | HIMEFSQDQHGSRFIQLKLERATPAERQLVFNEILQ | 497 |
| R2 | C | AAYQLMVDVFGSYVIRKFFEFGSLEQKLALAERIRG | 492 |
| R3 | G | HVLSLALQMYGSRVIEKALEFIPSDQQNEMVRELDG | 507 |
| R4 | A | HVLKCVKDQNGCHVVQKCIECVQPQSLQFIIDAFKG | 503 |
| R5 | C | QVFALSTHPYGSRVIRRILEHCLPDQTLPILEELHQ | 514 |
| R6 | G | HTEQLVQDQYGSYVIEHVLEHGRPEDKSKIVAEIRG | 501 |
| R7 | A | NVLVLSQHKFACNVVQKCVTHASRTERAVLIDEVCTMND | 509 |
| | | GPHS | |
| R7 | C | NVLVLSQHKFASYVVRKCVTHASRTERAVLIDEVCTMNDG | 511 |
| | | PHS | |
| R8 | G | ALYTMMKDQYASYVVEKMIDVAEPGQRKIVMHKIRP | 489 |
| PUF R8′ | — | HIATLRKYTYGKHILAKLEKYYMKNGVDLG | 496 |

[0689] An exemplary 15-mer RNA recognition targeting GCAGCAGCAGCAGCA (SEQ ID NO: 478) comprises the amino acid sequence: GRSRLLEDFRNNRYPNLQLREIAGHIMEFSQDQHGSRFIQLKLERATPAERQLVFNEI LQAAYQLMVDVFGSYVIRKFFEFGSLEQKLALAERIRGHVLSLALQMYGSRVIEKAL EFIPSDQQNEMVRELDGHVLKCVKDQNGCHVVQKCIECVQPQSLQFIIDAFKGQVFA LSTHPYGSRVIRRILEHCLPDQTLPILEELHQHTEQLVQDQYGSYVIEHVLEHGRPED KSKIVAEIRGNVLVLSQHKFACNVVQKCVTHASRTERAVLIDEVCTMNDGPHSHIME FSQDQHGSRFIRLKLERATPAERQLVFNEILQAAYQLMVDVFGSYVIEKFFEFGSLEQ KLALAERIRGHVLSLALQMYGCRVIQKALEFIPSDQQNEMVRELDGHVLKCVKDQN GSHVVRKCIECVQPQSLQFIIDAFKGQVFALSTHPYGSRVIERILEHCLPDQTLPILEEL HQHTEQLVQDQYGCYVIQHVLEHGRPEDKSKIVAEIRGNVLVLSQHKFASYVVRKC VTHASRTERAVLIDEVCTMNDGPHSALYTMMKDQYASYVVEKMIDVAEPGQRKIV MHKIRPHIATLRKYTYGKHILAKLEKYYMKNGVDLG (SEQ ID NO: 554). In some aspects, SEQ ID NO: 554 comprises an architecture proceeding from the N-terminus to the C-terminus according to: R1′-R1-R2-R3-R4-R5-R6-R7-R1-R2-R3-R4-R5-R6-R7-R8-R8′. In some aspects, SEQ ID NO: 554 is comprised of the sequences detailed in Table 34.

TABLE 34
15PUF protein according to SEQ ID NO: 554

| PUF | RNA | | SEQ |
|---|---|---|---|
| Module | Recognition | Amino Acid Sequence | ID NO |
| PUF R1′ | — | GRSRLLEDFRNNRYPNLQLREIAG | 495 |
| R1 | A | HIMEFSQDQHGSRFIQLKLERATPAERQLVFNEILQ | 497 |
| R2 | C | AAYQLMVDVFGSYVIRKFFEFGSLEQKLALAERIRG | 492 |
| R3 | G | HVLSLALQMYGSRVIEKALEFIPSDQQNEMVRELDG | 507 |
| R4 | A | HVLKCVKDQNGCHVVQKCIECVQPQSLQFIIDAFKG | 503 |
| R5 | C | QVFALSTHPYGSRVIRRILEHCLPDQTLPILEELHQ | 514 |
| R6 | G | HTEQLVQDQYGSYVIEHVLEHGRPEDKSKIVAEIRG | 501 |
| R7 | A | NVLVLSQHKFACNVVQKCVTHASRTERAVLIDEVCTMND | 509 |
| | | GPHS | |
| R1 | C | HIMEFSQDQHGSRFIRLKLERATPAERQLVFNEILQ | 499 |
| R2 | G | AAYQLMVDVFGSYVIEKFFEFGSLEQKLALAERIRG | 491 |
| R3 | A | HVLSLALQMYGCRVIQKALEFIPSDQQNEMVRELDG | 506 |
| R4 | C | HVLKCVKDQNGSHVVRKCIECVQPQSLQFIIDAFKG | 505 |
| R5 | G | QVFALSTHPYGSRVIERILEHCLPDQTLPILEELHQ | 513 |
| R6 | A | HTEQLVQDQYGCYVIQHVLEHGRPEDKSKIVAEIRG | 500 |
| R7 | C | NVLVLSQHKFASYVVRKCVTHASRTERAVLIDEVCTMNDG | 511 |
| | | PHS | |
| R8 | G | ALYTMMKDQYASYVVEKMIDVAEPGQRKIVMHKIRP | 489 |
| PUF R8′ | — | HIATLRKYTYGKHILAKLEKYYMKNGVDLG | 496 |

[0690] An exemplary 16-mer RNA recognition (16PUF) targeting GCAGCAGCAGCAGCAG (SEQ ID NO: 479) comprises the amino acid sequence: GRSRLLEDFRNNRYPNLQLREIAGHIMEFSQDQHGSRFIELKLERATPAERQLVFNEIL QAAYQLMVDVFGCYVIQKFFEFGSLEQKLALAERIRGHVLSLALQMYGSYVIRKAL EFIPSDQQNEMVRELDGHVLKCVKDQNGSYVVEKCIECVQPQSLQFIIDAFKGQVFA LSTHPYGCRVIQRILEHCLPDQTLPILEELHQHIMEFSQDQHGSRFIRLKLERATPAER QLVFNEILQAAYQLMVDVFGSYVIEKFFEFGSLEQKLALAERIRGHVLSLALQMYGC RVIQKALEFIPSDQQNEMVRELDGHVLKCVKDQNGSHVVRKCIECVQPQSLQFIIDA FKGQVFALSTHPYGSRVIERILEHCLPDQTLPILEELHQHTEQLVQDQYGCYVIQHVL EHGRPEDKSKIVAEIRGNVLVLSQHKFASYVVRKCVTHASRTERAVLIDEVCTMNDG PHSALYTMMKDQYASYVVEKMIDVAEPGQRKIVMHKIRPHTEQLVQDQYGCYVIQ HVLEHGRPEDKSKIVAEIRGNVLVLSQHKFASYVVRKCVTHASRTERAVLIDEVCTM NDGPHSALYTMMKDQYASYVVEKMIDVAEPGQRKIVMHKIRPHIATLRKYTYGKHI LAKLEKYYMKNGVDLG (SEQ ID NO: 555). In some aspects, SEQ ID NO: 555 comprises an architecture proceeding from the N-terminus to the C-terminus according to: R1′-R1-R2-R3-R4-R5-R1-R2-R3-R4-R5-R6-R7-R8-R6-R7-R8-R8′. In some aspects, SEQ ID NO: 555 is comprised of the sequences detailed in Table 35.

TABLE 35
16PUF protein according to SEQ ID NO: 555

| PUF | RNA | | SEQ |
|---|---|---|---|
| Module | Recognition | Amino Acid Sequence | ID NO |
| PUF R1′ | — | GRSRLLEDFRNNRYPNLQLREIAG | 495 |
| R1 | G | HIMEFSQDQHGSRFIELKLERATPAERQLVFNEILQ | 498 |
| R2 | A | AAYQLMVDVFGCYVIQKFFEFGSLEQKLALAERIRG | 490 |
| R3 | C | HVLSLALQMYGSYVIRKALEFIPSDQQNEMVRELDG | 508 |
| R4 | G | HVLKCVKDQNGSYVVEKCIECVQPQSLQFIIDAFKG | 504 |
| R5 | A | QVFALSTHPYGCRVIQRILEHCLPDQTLPILEELHQ | 512 |
| R1 | C | HIMEFSQDQHGSRFIRLKLERATPAERQLVFNEILQ | 499 |
| R2 | G | AAYQLMVDVFGSYVIEKFFEFGSLEQKLALAERIRG | 491 |
| R3 | A | HVLSLALQMYGCRVIQKALEFIPSDQQNEMVRELDG | 506 |
| R4 | C | HVLKCVKDQNGSHVVRKCIECVQPQSLQFIIDAFKG | 505 |
| R5 | G | QVFALSTHPYGSRVIERILEHCLPDQTLPILEELHQ | 513 |
| R6 | A | HTEQLVQDQYGCYVIQHVLEHGRPEDKSKIVAEIRG | 50 |
| R7 | C | NVLVLSQHKFASYVVRKCVTHASRTERAVLIDEVCTMNDG | 511 |
| | | PHS | |
| R8 | G | ALYTMMKDQYASYVVEKMIDVAEPGQRKIVMHKIRP | 489 |
| R6 | A | HTEQLVQDQYGCYVIQHVLEHGRPEDKSKIVAEIRG | 500 |
| R7 | C | NVLVLSQHKFASYVVRKCVTHASRTERAVLIDEVCTMNDG | 511 |
| | | PHS | |
| R8 | G | ALYTMMKDQYASYVVEKMIDVAEPGQRKIVMHKIRP | 489 |
| PUF R8′ | — | HIATLRKYTYGKHILAKLEKYYMKNGVDLG | 496 |

[0691] An exemplary 16-mer RNA recognition (16PUF) targeting GCAGCAGCAGCAGCAG (SEQ ID NO: 479) comprises the amino acid sequence: GRSRLLEDFRNNRYPNLQLREIAGHIMEFSQDQHGSRFIELKLERATPAERQLVFNEIL QAAYQLMVDVFGCYVIQKFFEFGSLEQKLALAERIRGHVLSLALQMYGSYVIRKAL EFIPSDQQNEMVRELDGHVLKCVKDQNGSYVVEKCIECVQPQSLQFIIDAFKGQVFA LSTHPYGCRVIQRILEHCLPDQTLPILEELHQHTEQLVQDQYGSYVIRHVLEHGRPED KSKIVAEIRGHIMEFSQDQHGSRFIELKLERATPAERQLVFNEILQAAYQLMVDVFGC YVIQKFFEFGSLEQKLALAERIRGHVLSLALQMYGSYVIRKALEFIPSDQQNEMVREL DGHVLKCVKDQNGSYVVEKCIECVQPQSLQFIIDAFKGQVFALSTHPYGCRVIQRILE HCLPDQTLPILEELHQHTEQLVQDQYGSYVIRHVLEHGRPEDKSKIVAEIRGNVLVLS QHKFASNVVEKCVTHASRTERAVLIDEVCTMNDGPHSALYTMMKDQYACYVVQK MIDVAEPGQRKIVMHKIRPNVLVLSQHKFASYVVRKCVTHASRTERAVLIDEVCTM NDGPHSALYTMMKDQYASYVVEKMIDVAEPGQRKIVMHKIRPHIATLRKYTYGKHI LAKLEKYYMKNGVDLG (SEQ ID NO: 556). In some aspects, SEQ ID NO: 556 comprises an architecture proceeding from the N-terminus to the C-terminus according to: R1′-R1-R2-R3-R4-R5-R6-R1-R2-R3-R4-R5-R6-R7-R8-R7-R8-R8′. In some aspects, SEQ ID NO: 556 is comprised of the sequences detailed in Table 36.

TABLE 36
16PUF protein according to SEQ ID NO: 556

| PUF | RNA | | SEQ |
|---|---|---|---|
| Module | Recognition | Amino Acid Sequence | ID NO |
| PUF R1′ | — | GRSRLLEDFRNNRYPNLQLREIAG | 495 |
| R1 | G | HIMEFSQDQHGSRFIELKLERATPAERQLVFNEILQ | 498 |
| R2 | A | AAYQLMVDVFGCYVIQKFFEFGSLEQKLALAERIRG | 490 |
| R3 | C | HVLSLALQMYGSYVIRKALEFIPSDQQNEMVRELDG | 508 |
| R4 | G | HVLKCVKDQNGSYVVEKCIECVQPQSLQFIIDAFKG | 504 |
| R5 | A | QVFALSTHPYGCRVIQRILEHCLPDQTLPILEELHQ | 512 |
| R6 | C | HTEQLVQDQYGSYVIRHVLEHGRPEDKSKIVAEIRG | 502 |
| R1 | G | HIMEFSQDQHGSRFIELKLERATPAERQLVFNEILQ | 498 |
| R2 | A | AAYQLMVDVFGCYVIQKFFEFGSLEQKLALAERIRG | 490 |
| R3 | C | HVLSLALQMYGSYVIRKALEFIPSDQQNEMVRELDG | 508 |
| R4 | G | HVLKCVKDQNGSYVVEKCIECVQPQSLQFIIDAFKG | 504 |
| R5 | A | QVFALSTHPYGCRVIQRILEHCLPDQTLPILEELHQ | 512 |
| R6 | C | HTEQLVQDQYGSYVIRHVLEHGRPEDKSKIVAEIRG | 502 |
| R7 | G | NVLVLSQHKFASNVVEKCVTHASRTERAVLIDEVCTMNDG | 510 |
| | | PHS | |
| R8 | A | ALYTMMKDQYACYVVQKMIDVAEPGQRKIVMHKIRP | 493 |
| R7 | C | NVLVLSQHKFASYVVRKCVTHASRTERAVLIDEVCTMNDG | 511 |
| | | PHS | |
| R8 | G | ALYTMMKDQYASYVVEKMIDVAEPGQRKIVMHKIRP | 489 |
| PUF R8′ | — | HIATLRKYTYGKHILAKLEKYYMKNGVDLG | 496 |

[0692] An exemplary 16-mer RNA recognition 16PUF targeting GCAGCAGCAGCAGCAG (SEQ ID NO: 479) comprises the amino acid sequence: GRSRLLEDFRNNRYPNLQLREIAGHIMEFSQDQHGSRFIELKLERATPAERQLVFNEIL QAAYQLMVDVFGCYVIQKFFEFGSLEQKLALAERIRGHVLSLALQMYGSYVIRKAL EFIPSDQQNEMVRELDGHVLKCVKDQNGSYVVEKCIECVQPQSLQFIIDAFKGQVFA LSTHPYGCRVIQRILEHCLPDQTLPILEELHQHTEQLVQDQYGSYVIRHVLEHGRPED KSKIVAEIRGNVLVLSQHKFASNVVEKCVTHASRTERAVLIDEVCTMNDGPHSALYT MMKDQYACYVVQKMIDVAEPGQRKIVMHKIRPHIMEFSQDQHGSRFIRLKLERATP AERQLVFNEILQAAYQLMVDVFGSYVIEKFFEFGSLEQKLALAERIRGHVLSLALQM YGCRVIQKALEFIPSDQQNEMVRELDGHVLKCVKDQNGSHVVRKCIECVQPQSLQF IIDAFKGQVFALSTHPYGSRVIERILEHCLPDQTLPILEELHQHTEQLVQDQYGCYVIQ HVLEHGRPEDKSKIVAEIRGNVLVLSQHKFASYVVRKCVTHASRTERAVLIDEVCTM NDGPHSALYTMMKDQYASYVVEKMIDVAEPGQRKIVMHKIRPHIATLRKYTYGKHI LAKLEKYYMKNGVDLG (SEQ ID NO: 557). In some aspects, SEQ ID NO: 557 comprises an architecture proceeding from the N-terminus to the C-terminus according to: R1′-R1-R2-R3-R4-R5-R6-R7-R8-R1-R2-R3-R4-R5-R6-R7-R8-R8′. In some aspects, SEQ ID NO: 557 is comprised of the sequences detailed in Table 37.

TABLE 37
16PUF protein according to SEQ ID NO: 557

| PUF | RNA | | SEQ |
|---|---|---|---|
| Module | Recognition | Amino Acid Sequence | ID NO |
| PUF R1′ | — | GRSRLLEDFRNNRYPNLQLREIAG | 495 |
| R1 | G | HIMEFSQDQHGSRFIELKLERATPAERQLVFNEILQ | 498 |
| R2 | A | AAYQLMVDVFGCYVIQKFFEFGSLEQKLALAERIRG | 490 |
| R3 | C | HVLSLALQMYGSYVIRKALEFIPSDQQNEMVRELDG | 508 |
| R4 | G | HVLKCVKDQNGSYVVEKCIECVQPQSLQFIIDAFKG | 504 |
| R5 | A | QVFALSTHPYGCRVIQRILEHCLPDQTLPILEELHQ | 512 |
| R6 | C | HTEQLVQDQYGSYVIRHVLEHGRPEDKSKIVAEIRG | 502 |
| R7 | G | NVLVLSQHKFASNVVEKCVTHASRTERAVLIDEVCTMNDG | 510 |
| | | PHS | |
| R8 | A | ALYTMMKDQYACYVVQKMIDVAEPGQRKIVMHKIRP | 493 |
| R1 | C | HIMEFSQDQHGSRFIRLKLERATPAERQLVFNEILQ | 499 |
| R2 | G | AAYQLMVDVFGSYVIEKFFEFGSLEQKLALAERIRG | 491 |
| R3 | A | HVLSLALQMYGCRVIQKALEFIPSDQQNEMVRELDG | 506 |
| R4 | C | HVLKCVKDQNGSHVVRKCIECVQPQSLQFIIDAFKG | 505 |
| R5 | G | QVFALSTHPYGSRVIERILEHCLPDQTLPILEELHQ | 513 |
| R6 | A | HTEQLVQDQYGCYVIQHVLEHGRPEDKSKIVAEIRG | 500 |
| R7 | C | NVLVLSQHKFASYVVRKCVTHASRTERAVLIDEVCTMNDG | 511 |
| | | PHS | |
| R8 | G | ALYTMMKDQYASYVVEKMIDVAEPGQRKIVMHKIRP | 489 |
| PUF R8′ | — | HIATLRKYTYGKHILAKLEKYYMKNGVDLG | 496 |

[0693] An exemplary 8-mer RNA recognition (8PUFtargeting GCAGCAGC (SEQ ID NO: 476 corn rises the amino acid sequence:

(SEQ ID NO: 568)
GRSRLLEDFRNNRYPNLQLREIAGHIMEFSQDQHGSRFIRLKLERATPA
ERQLVFNEILQAAYQLMVDVFGSYVIEKFFEFGSLEQKLALAERIRGHV
LSLALQMYGCRVIQKALEFIPSDQQNEMVRELDGHVLKCVKDQNGSHVV
RKCIECVQPQSLQFIIDAFKGQVFALSTHPYGSRVIERILEHCLPDQTL
PILEELHQHTEQLVQDQYGCYVIQHVLEHGRPEDKSKIVAEIRGNVLVL
SQHKFASYVVRKCVTHASRTERAVLIDEVCTMNDGPHSALYTMMKDQYA
SYVVEKMIDVAEPGQRKIVMHKIRPHIATLRKYTYGKHILAKLEKYYMK
NGVDLG.

[0694] An exemplary 14-mer RNA recognition (14PUF) targeting GCAGCAGCAGCAGC (SEQ ID NO: 477) comprises the amino acid sequence:

(SEQ ID NO: 569)
GRSRLLEDFRNNRYPNLQLREIAGHIMEFSQDQHGSRFIRLKLERATPA
ERQLVFNEILQAAYQLMVDVFGSYVIEKFFEFGSLEQKLALAERIRGHV
LSLALQMYGCRVIQKALEFIPSDQQNEMVRELDGHVLKCVKDQNGSYVV
RKCIECVQPQSLQFIIDAFKGQVFALSTHPYGSRVIERILEHCLPDQTL
PILEELHQHIMEFSQDQHGSRFIQLKLERATPAERQLVFNEILQAAYQL
MVDVFGSYVIRKFFEFGSLEQKLALAERIRGHVLSLALQMYGSRVIEKA
LEFIPSDQQNEMVRELDGHVLKCVKDQNGCHVVQKCIECVQPQSLQFII
DAFKGQVFALSTHPYGSRVIRRILEHCLPDQTLPILEELHQHTEQLVQD
QYGSYVIEHVLEHGRPEDKSKIVAEIRGHTEQLVQDQYGCYVIQHVLEH
GRPEDKSKIVAEIRGNVLVLSQHKFASYVVRKCVTHASRTERAVLIDEV
CTMNDGPHSALYTMMKDQYASYVVEKMIDVAEPGQRKIVMHKIRPHIAT
LRKYTYGKHILAKLEKYYMKNGVDLG.

[0695] An exemplary 14-mer RNA recognition (14PUF) targeting GCAGCAGCAGCAGC (SEQ ID NO: 477) comprises the amino acid sequence:

(SEQ ID NO: 570)
GRSRLLEDFRNNRYPNLQLREIAGHIMEFSQDQHGSRFIRLKLERATPA
ERQLVFNEILQAAYQLMVDVFGSYVIEKFFEFGSLEQKLALAERIRGHV
LSLALQMYGCRVIQKALEFIPSDQQNEMVRELDGHVLKCVKDQNGSYVV
RKCIECVQPQSLQFIIDAFKGQVFALSTHPYGSRVIERILEHCLPDQTL
PILEELHQHTEQLVQDQYGCYVIQHVLEHGRPEDKSKIVAEIRGHIMEF
SQDQHGSRFIRLKLERATPAERQLVFNEILQAAYQLMVDVFGSYVIEKF
FEFGSLEQKLALAERIRGHVLSLALQMYGCRVIQKALEFIPSDQQNEMV
RELDGHVLKCVKDQNGSYVVRKCIECVQPQSLQFIIDAFKGQVFALSTH
PYGSRVIERILEHCLPDQTLPILEELHQHTEQLVQDQYGCYVIQHVLEH
GRPEDKSKIVAEIRGNVLVLSQHKFASYVVRKCVTHASRTERAVLIDEV
CTMNDGPHSALYTMMKDQYASYVVEKMIDVAEPGQRKIVMHKIRPHIAT
LRKYTYGKHILAKLEKYYMKNGVDLG.

[0696] An exemplary 15-mer RNA recognition (15PUF) targeting GCAGCAGCAGCAGCA (SEQ ID NO: 478) comprises the amino acid sequence:

(SEQ ID NO: 571)
GRSRLLEDFRNNRYPNLQLREIAGHIMEFSQDQHGSRFIQLKLERATPA
ERQLVFNEILQAAYQLMVDVFGSYVIRKFFEFGSLEQKLALAERIRGHV
LSLALQMYGSRVIEKALEFIPSDQQNEMVRELDGHVLKCVKDQNGCHVV
QKCIECVQPQSLQFIIDAFKGQVFALSTHPYGSRVIRRILEHCLPDQTL
PILEELHQHTEQLVQDQYGSYVIEHVLEHGRPEDKSKIVAEIRGNVLVL
SQHKFACNVVQKCVTHASRTERAVLIDEVCTMNDGPHSHIMEFSQDQHG
SRFIRLKLERATPAERQLVFNEILQAAYQLMVDVFGSYVIEKFFEFGSL
EQKLALAERIRGHVLSLALQMYGCRVIQKALEFIPSDQQNEMVRELDGH
VLKCVKDQNGSYVVRKCIECVQPQSLQFIIDAFKGQVFALSTHPYGSRV
IERILEHCLPDQTLPILEELHQHTEQLVQDQYGCYVIQHVLEHGRPEDK
SKIVAEIRGNVLVLSQHKFASYVVRKCVTHASRTERAVLIDEVCTMNDG
PHSALYTMMKDQYASYVVEKMIDVAEPGQRKIVMHKIRPHIATLRKYTY
GKHILAKLEKYYMKNGVDLG.

[0697] An exemplary 16-mer RNA recognition (16PUF) targeting GCAGCAGCAGCAGCAG (SEQ ID NO: 479) comprises the amino acid sequence:

(SEQ ID NO: 572)
GRSRLLEDFRNNRYPNLQLREIAGHIMEFSQDQHGSRFIELKLERATPA
ERQLVFNEILQAAYQLMVDVFGCYVIQKFFEFGSLEQKLALAERIRGHV
LSLALQMYGSYVIRKALEFIPSDQQNEMVRELDGHVLKCVKDQNGSYVV
EKCIECVQPQSLQFIIDAFKGQVFALSTHPYGCRVIQRILEHCLPDQTL
PILEELHQHIMEFSQDQHGSRFIRLKLERATPAERQLVFNEILQAAYQL
MVDVFGSYVIEKFFEFGSLEQKLALAERIRGHVLSLALQMYGCRVIQKA
LEFIPSDQQNEMVRELDGHVLKCVKDQNGSYVVRKCIECVQPQSLQFII
DAFKGQVFALSTHPYGSRVIERILEHCLPDQTLPILEELHQHTEQLVQD
QYGCYVIQHVLEHGRPEDKSKIVAEIRGNVLVLSQHKFASYVVRKCVTH
ASRTERAVLIDEVCTMNDGPHSALYTMMKDQYASYVVEKMIDVAEPGQR
KIVMHKIRPHTEQLVQDQYGCYVIQHVLEHGRPEDKSKIVAEIRGNVLV
LSQHKFASYVVRKCVTHASRTERAVLIDEVCTMNDGPHSALYTMMKDQY
ASYVVEKMIDVAEPGQRKIVMHKIRPHIATLRKYTYGKHILAKLEKYYM
KNGVDLG

[0698] An exemplary 16-mer RNA recognition (16PUF) targeting GCAGCAGCAGCAGCAG (SEQ ID NO: 479) comprises the amino acid sequence:

(SEQ ID NO: 573)
GRSRLLEDFRNNRYPNLQLREIAGHIMEFSQDQHGSRFIELKLERATPA
ERQLVFNEILQAAYQLMVDVFGCYVIQKFFEFGSLEQKLALAERIRGHV
LSLALQMYGSYVIRKALEFIPSDQQNEMVRELDGHVLKCVKDQNGSYVV
EKCIECVQPQSLQFIIDAFKGQVFALSTHPYGCRVIQRILEHCLPDQTL
PILEELHQHTEQLVQDQYGSYVIRHVLEHGRPEDKSKIVAEIRGNVLVL
SQHKFASNVVEKCVTHASRTERAVLIDEVCTMNDGPHSALYTMMKDQYA
CYVVQKMIDVAEPGQRKIVMHKIRPHIMEFSQDQHGSRFIRLKLERATP
AERQLVFNEILQAAYQLMVDVFGSYVIEKFFEFGSLEQKLALAERIRGH
VLSLALQMYGCRVIQKALEFIPSDQQNEMVRELDGHVLKCVKDQNGSYV
VRKCIECVQPQSLQFIIDAFKGQVFALSTHPYGSRVIERILEHCLPDQT
LPILEELHQHTEQLVQDQYGCYVIQHVLEHGRPEDKSKIVAEIRGNVLV
LSQHKFASYVVRKCVTHASRTERAVLIDEVCTMNDGPHSALYTMMKDQY
ASYVVEKMIDVAEPGQRKIVMHKIRPHIATLRKYTYGKHILAKLEKYYM
KNGVDLG

[0699] In some embodiments, nucleic acid sequences encoding PUF proteins of the disclosure are codon optimized nucleic acid sequences. In some embodiments, the codon optimized sequence encoding a PUF protein exhibits at least 5%, at least 10%, at least 20%, at least 30%, at least 50%, at least 75%, at least 100%, at least 200%, at least 300%, at least 500%, or at least 1000% increased expression in a human subject relative to a wild-type or non-codon optimized nucleic acid sequence. In some embodiments, an 8PUF protein of the disclosure is encoded by a nucleic acid sequences comprising SEQ ID NO: 576 or 581. In some embodiments, a nucleotide sequence encoding a CAG-targeting fusion protein comprises, from 5′ to 3′: a flag tag, H2B nuclear localization sequence, an 8PUF, and an E17 nuclease is set forth in SEQ ID NO: 578. In some embodiments, a nucleotide sequence encoding a CAG-targeting fusion protein comprises, from 5′ to 3′: a H2B nuclear localization sequence, an 8PUF, an E17 nuclease, and a PKI NES is set forth in SEQ ID NO: 575. In some embodiments, a nucleotide sequence encoding a CAG-targeting fusion protein comprises, from 5′ to 3′: a H2B nuclear localization sequence, an 8PUF, and an E17 nuclease in SEQ ID NO: 577. In some embodiments, a nucleotide sequence encoding a CAG-targeting fusion protein comprises, from 5′ to 3′: an H2B nuclear localization sequence, an 8PUF, and an E17 nuclease is set forth in SEQ ID NO: 579. In some embodiments, a nucleotide sequence encoding a CAG-targeting fusion protein comprises, from 5′ to 3′: an H2B nuclear localization sequence, an 8PUF, an E17 nuclease and PKI nuclear export sequences is set forth in SEQ ID NO: 574. In some embodiments, a nucleotide sequence encoding a CAG-targeting fusion protein comprises, from 5′ to 3′: an RB NLS, an 8PUF and an E17 nuclease is set forth in SEQ ID NO: 580 or 582.

[0700] In some embodiments, nucleic acid sequences encoding PUF proteins of the disclosure are codon optimized nucleic acid sequences. In some embodiments, the codon optimized sequence encoding a PUF protein exhibits at least 5%, at least 10%, at least 20%, at least 30%, at least 50%, at least 75%, at least 100%, at least 200%, at least 300%, at least 500%, or at least 1000% increased translation in a human subject relative to a wild-type or non-codon optimized nucleic acid sequence.

[0701] In some aspects, a codon optimized nucleic acid sequence encoding a PUF protein such as those put forth in SEQ ID NOs: 574-582 exhibits increased stability. In some aspects, a codon optimized nucleic acid sequence encoding a PUF protein exhibits increased stability through increased resistance to hydrolysis. In some embodiments, the codon optimized sequence encoding a PUF protein exhibits at least 5%, at least 10%, at least 20%, at least 30%, at least 50%, at least 75%, at least 100%, at least 200%, at least 300%, at least 500%, or at least 1000% increased stability relative to a wild-type or non-codon optimized nucleic acid sequence. In some embodiments, the codon optimized sequence encoding a PUF protein exhibits at least 5%, at least 10%, at least 20%, at least 30%, at least 50%, at least 75%, at least 100%, at least 200%, at least 300%, at least 500%, or at least 1000% increased resistance to hydrolysis in a human subject relative to a wild-type or non-codon optimized nucleic acid sequence.

[0702] In some aspects, a codon optimized nucleic acid sequence encoding a PUF protein such as those put forth in SEQ ID NOs: 574-582, can comprise no donor splice sites. In some aspects, a codon optimized nucleic acid sequence encoding a PUF protein can comprise no more than about one, or about two, or about three, or about four, or about five, or about six, or about seven, or about eight, or about nine, or about ten donor splice sites. In some aspects, a codon optimized nucleic acid sequence encoding a PUF protein comprises at least one, or at least two, or at least three, or at least four, or at least five, or at least six, or at least seven, or at least eight, or at least nine, or at least ten fewer donor splice sites as compared to a non-codon optimized nucleic acid sequence encoding the PUF protein.

[0703] Without wishing to be bound by theory, the removal of donor splice sites in the codon optimized nucleic acid sequence can unexpectedly and unpredictably increase expression of the PUF protein in vivo, as cryptic splicing is prevented. Moreover, cryptic splicing may vary between different subjects, meaning that the expression level of the PUF protein comprising donor splice sites may unpredictably vary between different subjects. Such unpredictability is unacceptable in the context of human therapy. Accordingly, the codon optimized nucleic acid sequences put forth in SEQ ID NOs: 574-582, which lacks donor splice sites, unexpectedly and surprisingly allows for increased expression of the PUF protein in human subjects and regularizes expression of the PUF protein across different human subjects.

[0704] In some aspects, a codon optimized nucleic acid sequence encoding a PUF protein, such as those put forth in SEQ ID NOs: 574-582, can have a GC content that differs from the GC content of the non-codon optimized nucleic acid sequence encoding the PUF protein. In some aspects, the GC content of a codon optimized nucleic acid sequence encoding a PUF protein is more evenly distributed across the entire nucleic acid sequence, as compared to the non-codon optimized nucleic acid sequence encoding the PUF protein.

[0705] Without wishing to be bound by theory, by more evenly distributing the GC content across the entire nucleic acid sequence, the codon optimized nucleic acid sequence exhibits a more uniform melting temperature (“Tm”) across the length of the transcript. The uniformity of melting temperature results unexpectedly in increased expression of the codon optimized nucleic acid in a human subject, as transcription and/or translation of the nucleic acid sequence occurs with less stalling of the polymerase and/or ribosome.

[0706] In some aspects, a codon optimized nucleic acid sequence encoding a PUF protein, such as those put forth in SEQ ID NOs: 574-582, can have fewer repressive microRNA target binding sites as compared to the non-codon optimized nucleic acid sequence encoding the PUF protein. In some aspects, a codon optimized nucleic acid sequence encoding a PUF protein can have at least one, or at least two, or at least three, or at least four, or at least five, or at least six, or at least seven, or at least eight, or at least nine, or at least ten, or at least ten fewer repressive microRNA target binding sites as compared to the non-codon optimized nucleic acid sequence the PUF protein.

[0707] Without wishing to be bound by theory, by having fewer repressive microRNA target binding sites, the codon optimized nucleic acid sequence encoding a PUF protein unexpectedly exhibits increased expression in a human subject.

[0708] In some embodiments, an 8PUF protein can be encoded by a nucleic acid sequence comprising:

(SEQ ID NO: 452)
GGACGAAGCCGACTCTTGGAAGACTTCAGAAACAATCGGTATCCGAACC
TTCAGCTGAGAGAAATTGCTGGTCACATCATGGAATTTTCTCAAGATCA
ACATGGAAGCCGGTTTATTGAACTTAAACTCGAACGAGCCACCCCGGCC
GAAAGGCAATTGGTGTTCAATGAAATTCTTCAGGCCGCATACCAACTCA
TGGTTGATGTTTTTGGGAACTATGTTATTCAAAAGTTTTTTGAGTTCGG
GTCACTGGAGCAAAAGTTGGCATTGGCAGAGCGAATCCGGGGCCATGTT
CTGAGCCTCGCTCTCCAAATGTACGGTAGTTATGTCATTCGCAAAGCAC
TCGAGTTCATACCATCAGATCAACAGAATGAGATGGTGCGGGAGCTGGA
TGGGCATGTTTTGAAATGCGTGAAAGACCAAAACGGTAGCTACGTAGTT
GAGAAATGCATCGAATGCGTCCAACCACAGTCTCTCCAATTTATTATAG
ATGCATTTAAGGGTCAGGTTTTCGCGCTTTCTACGCACCCGTATGGGAA
CCGAGTGATTCAGAGAATCTTGGAGCACTGCCTGCCGGATCAGACACTC
CCTATCTTGGAGGAATTGCACCAGCATACCGAACAATTGGTGCAAGATC
AATACGGTTCATATGTTATTCGGCACGTTCTTGAGCATGGAAGGCCAGA
GGACAAGTCAAAGATCGTCGCTGAGATTAGAGGTAACGTATTGGTGCTC
TCACAACACAAATTTGCATCTAATGTGGTGGAGAAATGTGTTACTCATG
CTTCTAGAACGGAAAGGGCAGTTCTCATAGACGAAGTTTGCACAATGAA
TGATGGTCCTCATAGCGCACTTTATACCATGATGAAGGACCAGTATGCA
AACTATGTCGTCCAGAAAATGATCGATGTGGCGGAGCCCGGTCAACGGA
AAATCGTGATGCACAAAATCCGACCTCACATTGCTACACTCAGAAAATA
CACGTATGGAAAACATATTCTGGCTAAGCTGGAGAAATATTACATGAAG
AATGGAGTGGATCTGGGG.

[0709] An exemplary 14-mer RNA recognition (14PUMBY) targeting CAGCAGCAGCAGCA (SEQ ID NO: 454) comprises the amino acid sequence: GRSRLLEDFRNNRYPNLQLREIAGHTEQLVQDQYGCYVIQHVLEHGRPEDKSKIVAEIRGHT EQLVQDQYGSYVIRHVLEHGRPEDKSKIVAEIRGHTEQLVQDQYGSYVIEHVLEHGRPEDKS KIVAEIRGHTEQLVQDQYGCYVIQHVLEHGRPEDKSKIVAEIRGHTEQLVQDQYGSYVIRHV LEHGRPEDKSKIVAEIRGHTEQLVQDQYGSYVIEHVLEHGRPEDKSKIVAEIRGHTEQLVQDQ YGCYVIQHVLEHGRPEDKSKIVAEIRGHTEQLVQDQYGSYVIRHVLEHGRPEDKSKIVAEIRG HTEQLVQDQYGSYVIEHVLEHGRPEDKSKIVAEIRGHTEQLVQDQYGCYVIQHVLEHGRPED KSKIVAEIRGHTEQLVQDQYGSYVIRHVLEHGRPEDKSKIVAEIRGHTEQLVQDQYGSYVIEH VLEHGRPEDKSKIVAEIRGHTEQLVQDQYGCYVIQHVLEHGRPEDKSKIVAEIRGHTEQLVQ DQYGSYVIRHVLEHGRPEDKSKIVAEIRGHIATLRKYTYGKHILAKLEKYYMKNGVDLG (SEQ ID NO: 548). In some aspects, SEQ ID NO: 548 comprises an architecture proceeding from the N-terminus to the C-terminus according to: R1′-R6-R6-R6-R6-R6-R6-R6-R6-R6-R6-R6-R6-R6-R6-R8′. In some aspects, SEQ ID NO: 548 is comprised of the sequences detailed in Table 38.

TABLE 38
14Pumby protein according to SEQ ID NO: 548

| PUF | RNA | | SEQ ID |
|---|---|---|---|
| Module | Recognition | Amino Acid Sequence | NO: |
| PUF R1′ | — | GRSRLLEDFRNNRYPNLQLREIAG | 495 |
| R6 | A | HTEQLVQDQYGCYVIQHVLEHGRPEDKSKIVAEIRG | 500 |
| R6 | C | HTEQLVQDQYGSYVIRHVLEHGRPEDKSKIVAEIRG | 502 |
| R6 | G | HTEQLVQDQYGSYVIEHVLEHGRPEDKSKIVAEIRG | 501 |
| R6 | A | HTEQLVQDQYGCYVIQHVLEHGRPEDKSKIVAEIRG | 500 |
| R6 | C | HTEQLVQDQYGSYVIRHVLEHGRPEDKSKIVAEIRG | 502 |
| R6 | G | HTEQLVQDQYGSYVIEHVLEHGRPEDKSKIVAEIRG | 501 |
| R6 | A | HTEQLVQDQYGCYVIQHVLEHGRPEDKSKIVAEIRG | 500 |
| R6 | C | HTEQLVQDQYGSYVIRHVLEHGRPEDKSKIVAEIRG | 502 |
| R6 | G | HTEQLVQDQYGSYVIEHVLEHGRPEDKSKIVAEIRG | 501 |
| R6 | A | HTEQLVQDQYGCYVIQHVLEHGRPEDKSKIVAEIRG | 500 |
| R6 | C | HTEQLVQDQYGSYVIRHVLEHGRPEDKSKIVAEIRG | 502 |
| R6 | G | HTEQLVQDQYGSYVIEHVLEHGRPEDKSKIVAEIRG | 501 |
| R6 | A | HTEQLVQDQYGCYVIQHVLEHGRPEDKSKIVAEIRG | 500 |
| R6 | C | HTEQLVQDQYGSYVIRHVLEHGRPEDKSKIVAEIRG | 502 |
| PUF R8′ | — | HIATLRKYTYGKHILAKLEKYYMKNGVDLG | 496 |

[0710] An exemplary 14-mer RNA recognition (14PUMBY) targeting GCAGCAGCAGCAGC (SEQ ID NO: 477) comprises the amino acid sequence: GRSRLLEDFRNNRYPNLQLREIAGHTEQLVQDQYGSYVIRHVLEHGRPEDKSKIVAEIRGHTE QLVQDQYGSYVIEHVLEHGRPEDKSKIVAEIRGHTEQLVQDQYGCYVIQHVLEHGRPEDKSK IVAEIRGHTEQLVQDQYGSYVIRHVLEHGRPEDKSKIVAEIRGHTEQLVQDQYGSYVIEHVLE HGRPEDKSKIVAEIRGHTEQLVQDQYGCYVIQHVLEHGRPEDKSKIVAEIRGHTEQLVQDQY GSYVIRHVLEHGRPEDKSKIVAEIRGHTEQLVQDQYGSYVIEHVLEHGRPEDKSKIVAEIRGH TEQLVQDQYGCYVIQHVLEHGRPEDKSKIVAEIRGHTEQLVQDQYGSYVIRHVLEHGRPEDK SKIVAEIRGHTEQLVQDQYGSYVIEHVLEHGRPEDKSKIVAEIRGHTEQLVQDQYGCYVIQHV LEHGRPEDKSKIVAEIRGHTEQLVQDQYGSYVIRHVLEHGRPEDKSKIVAEIRGHTEQLVQDQ YGSYVIEHVLEHGRPEDKSKIVAEIRGHIATLRKYTYGKHILAKLEKYYMKNGVDLG (SEQ ID NO: 558). In some aspects, SEQ ID NO: 558 comprises an architecture proceeding from the N-terminus to the C-terminus according to: R1′-R6-R6-R6-R6-R6-R6-R6-R6-R6-R6-R6-R6-R6-R6-R8′. In some aspects, SEQ ID NO: 558 is comprised of the sequences detailed in Table 39.

TABLE 39
14Pumby protein according to SEQ ID NO: 558

| PUF | RNA | | SEQ ID |
|---|---|---|---|
| Module | Recognition | Amino Acid Sequence | NO: |
| PUF R1′ | — | GRSRLLEDFRNNRYPNLQLREIAG | 495 |
| R6 | C | HTEQLVQDQYGSYVIRHVLEHGRPEDKSKIVAEIRG | 502 |
| R6 | G | HTEQLVQDQYGSYVIEHVLEHGRPEDKSKIVAEIRG | 501 |
| R6 | A | HTEQLVQDQYGCYVIQHVLEHGRPEDKSKIVAEIRG | 500 |
| R6 | C | HTEQLVQDQYGSYVIRHVLEHGRPEDKSKIVAEIRG | 502 |
| R6 | G | HTEQLVQDQYGSYVIEHVLEHGRPEDKSKIVAEIRG | 501 |
| R6 | A | HTEQLVQDQYGCYVIQHVLEHGRPEDKSKIVAEIRG | 500 |
| R6 | C | HTEQLVQDQYGSYVIRHVLEHGRPEDKSKIVAEIRG | 502 |
| R6 | G | HTEQLVQDQYGSYVIEHVLEHGRPEDKSKIVAEIRG | 501 |
| R6 | A | HTEQLVQDQYGCYVIQHVLEHGRPEDKSKIVAEIRG | 500 |
| R6 | C | HTEQLVQDQYGSYVIRHVLEHGRPEDKSKIVAEIRG | 502 |
| R6 | G | HTEQLVQDQYGSYVIEHVLEHGRPEDKSKIVAEIRG | 501 |
| R6 | A | HTEQLVQDQYGCYVIQHVLEHGRPEDKSKIVAEIRG | 500 |
| R6 | C | HTEQLVQDQYGSYVIRHVLEHGRPEDKSKIVAEIRG | 502 |
| R6 | G | HTEQLVQDQYGSYVIEHVLEHGRPEDKSKIVAEIRG | 501 |
| PUF R8′ | — | HIATLRKYTYGKHILAKLEKYYMKNGVDLG | 496 |

[0711] An exemplary 14-mer RNA recognition (14PUMBY) targeting AGCAGCAGCAGCAG (SEQ ID NO: 473) comprises the amino acid sequence: GRSRLLEDFRNNRYPNLQLREIAGHTEQLVQDQYGSYVIEHVLEHGRPEDKSKIVAEIRGHTE QLVQDQYGCYVIQHVLEHGRPEDKSKIVAEIRGHTEQLVQDQYGSYVIRHVLEHGRPEDKSK IVAEIRGHTEQLVQDQYGSYVIEHVLEHGRPEDKSKIVAEIRGHTEQLVQDQYGCYVIQHVLE HGRPEDKSKIVAEIRGHTEQLVQDQYGSYVIRHVLEHGRPEDKSKIVAEIRGHTEQLVQDQY GSYVIEHVLEHGRPEDKSKIVAEIRGHTEQLVQDQYGCYVIQHVLEHGRPEDKSKIVAEIRGH TEQLVQDQYGSYVIRHVLEHGRPEDKSKIVAEIRGHTEQLVQDQYGSYVIEHVLEHGRPEDK SKIVAEIRGHTEQLVQDQYGCYVIQHVLEHGRPEDKSKIVAEIRGHTEQLVQDQYGSYVIRH VLEHGRPEDKSKIVAEIRGHTEQLVQDQYGSYVIEHVLEHGRPEDKSKIVAEIRGHTEQLVQD QYGCYVIQHVLEHGRPEDKSKIVAEIRGHIATLRKYTYGKHILAKLEKYYMKNGVDLG (SEQ ID NO: 547). In some aspects, SEQ ID NO: 547 comprises an architecture proceeding from the N-terminus to the C-terminus according to: R1′-R6-R6-R6-R6-R6-R6-R6-R6-R6-R6-R6-R6-R6-R6-R8′. In some aspects, SEQ ID NO: 547 is comprised of the sequences detailed in Table 40.

TABLE 40
14Pumby protein according to SEQ ID NO: 547

| PUF | RNA | | |
|---|---|---|---|
| Module | Recognition | Amino Acid Sequence | SEQ ID NO: |
| PUF R1′ | — | GRSRLLEDFRNNRYPNLQLREIAG | 495 |
| R6 | G | HTEQLVQDQYGSYVIEHVLEHGRPEDKSKIVAEIRG | 501 |
| R6 | A | HTEQLVQDQYGCYVIQHVLEHGRPEDKSKIVAEIRG | 500 |
| R6 | C | HTEQLVQDQYGSYVIRHVLEHGRPEDKSKIVAEIRG | 502 |
| R6 | G | HTEQLVQDQYGSYVIEHVLEHGRPEDKSKIVAEIRG | 501 |
| R6 | A | HTEQLVQDQYGCYVIQHVLEHGRPEDKSKIVAEIRG | 500 |
| R6 | C | HTEQLVQDQYGSYVIRHVLEHGRPEDKSKIVAEIRG | 502 |
| R6 | G | HTEQLVQDQYGSYVIEHVLEHGRPEDKSKIVAEIRG | 501 |
| R6 | A | HTEQLVQDQYGCYVIQHVLEHGRPEDKSKIVAEIRG | 500 |
| R6 | C | HTEQLVQDQYGSYVIRHVLEHGRPEDKSKIVAEIRG | 502 |
| R6 | G | HTEQLVQDQYGSYVIEHVLEHGRPEDKSKIVAEIRG | 501 |
| R6 | A | HTEQLVQDQYGCYVIQHVLEHGRPEDKSKIVAEIRG | 500 |
| R6 | C | HTEQLVQDQYGSYVIRHVLEHGRPEDKSKIVAEIRG | 502 |
| R6 | G | HTEQLVQDQYGSYVIEHVLEHGRPEDKSKIVAEIRG | 501 |
| R6 | A | HTEQLVQDQYGCYVIQHVLEHGRPEDKSKIVAEIRG | 500 |
| PUF R8′ | — | HIATLRKYTYGKHILAKLEKYYMKNGVDLG | 496 |

[0712] In some aspects, fusion proteins of the disclosure comprise a PUF according to SEQ ID NOs: 444-451, 461, 480-488, or 549-557. In some aspects, fusion proteins of the disclosure are arranged from N- to C-terminus as set forth in any one of Tables 41-49.

TABLE 41
Exemplary 8PUF targeting CAG Fusion Protein

| Plasmid | RNA | |
|---|---|---|
| Element | Recognition | Amino Acid Sequence |
| 8PUF | CAGCAGCA | GRSRLLEDFRNNRYPNLQLREIAGHI |
| Frame 1 | | MEFSQDQHGSRFIQLKLERATPAERQ |
| | | LVFNEILQAAYQLMVDVFGSYVIRKF |
| | | FEFGSLEQKLALAERIRGHVLSLALQ |
| | | MYGSRVIEKALEFIPSDQQNEMVREL |
| | | DGHVLKCVKDQNGCYVVQKCIECVQP |
| | | QSLQFIIDAFKGQVFALSTHPYGSRV |
| | | IRRILEHCLPDQTLPILEELHQHTEQ |
| | | LVQDQYGSYVIEHVLEHGRPEDKSKI |
| | | VAEIRGNVLVLSQHKFACNVVQKCVT |
| | | HASRTERAVLIDEVCTMNDGPHSALY |
| | | TMMKDQYASYVVRKMIDVAEPGQRKI |
| | | VMHKIRPHIATLRKYTYGKHILAKLE |
| | | KYYMKNGVDLG |
| | | (SEQ ID NO: 480) |
| Linker | — | VDTANGS |
| | | (SEQ ID NO: 411) |
| E17 | — | GGGTPKAPNLEPPLPEEEKEGSDLRP |
| endonuclease | | VVIDGSNVAMSHGNKEVFSCRGILLA |
| | | VNWFLERGHTDITVFVPSWRKEQPRP |
| | | DVPITDQHILRELEKKKILVFTPSRR |
| | | VGGKRVVCYDDRFIVKLAYESDGIVV |
| | | SNDTYRDLQGERQEWKRFIEERLLMY |
| | | SFVNDKFMPPDDPLGRHGPSLDNFLR |
| | | KKPLTLE |
| | | (SEQ ID NO: 358) |

TABLE 42
Exemplary 8PUF targeting CAG Fusion Protein

| Plasmid | RNA | |
|---|---|---|
| Element | Recognition | Amino Acid Sequence |
| 8PUF | GCAGCAGC | GRSRLLEDFRNNRYPNLQLREIAGHI |
| Frame 2 | | MEFSQDQHGSRFIRLKLERATPAERQ |
| | | LVFNEILQAAYQLMVDVFGSYVIEKF |
| | | FEFGSLEQKLALAERIRGHVLSLALQ |
| | | MYGCRVIQKALEFIPSDQQNEMVREL |
| | | DGHVLKCVKDQNGSYVVRKCIECVQP |
| | | QSLQFIIDAFKGQVFALSTHPYGSRV |
| | | IERILEHCLPDQTLPILEELHQHTEQ |
| | | LVQDQYGCYVIQHVLEHGRPEDKSKI |
| | | VAEIRGNVLVLSQHKFASYVVRKCVT |
| | | HASRTERAVLIDEVCTMNDGPHSALY |
| | | TMMKDQYASYVVEKMIDVAEPGQRKI |
| | | VMHKIRPHIATLRKYTYGKHILAKLE |
| | | KYYMKNGVDLG |
| | | (SEQ ID NO: 549) |
| Linker | — | VDTANGS |
| | | (SEQ ID NO: 411) |
| E17 | — | GGGTPKAPNLEPPLPEEEKEGSDLRP |
| endonuclease | | VVIDGSNVAMSHGNKEVFSCRGILLA |
| | | VNWFLERGHTDITVFVPSWRKEQPRP |
| | | DVPITDQHILRELEKKKILVFTPSRR |
| | | VGGKRVVCYDDRFIVKLAYESDGIVV |
| | | SNDTYRDLQGERQEWKRFIEERLLMY |
| | | SFVNDKFMPPDDPLGRHGPSLDNFLR |
| | | KKPLTLE |
| | | (SEQ ID NO: 358) |

TABLE 43
Exemplary 8PUF targeting CAG Fusion Protein

| | RNA | |
|---|---|---|
| Plasmid Element | Recognition | Amino Acid Sequence |
| Extra amino acids | | GSIVAVSRGM |
| between NLS and | | (SEQ ID NO: 387) |
| R1′ | | |
| 8PUF | CAGCAGCA | GRSRLLEDFRNNRYPNLQLRE |
| | | IAGHIMEFSQDQHGSRFIQLK |
| | | LERATPAERQLVFNEILQAAY |
| | | QLMVDVFGSYVIRKFFEFGSL |
| | | EQKLALAERIRGHVLSLALQM |
| | | YGSRVIEKALEFIPSDQQNEM |
| | | VRELDGHVLKCVKDQNGCYVV |
| | | QKCIECVQPQSLQFIIDAFKG |
| | | QVFALSTHPYGSRVIRRILEH |
| | | CLPDQTLPILEELHQHTEQLV |
| | | QDQYGSYVIEHVLEHGRPEDK |
| | | SKIVAEIRGNVLVLSQHKFAC |
| | | NVVQKCVTHASRTERAVLIDE |
| | | VCTMNDGPHSALYTMMKDQYA |
| | | SYVVRKMIDVAEPGQRKIVMH |
| | | KIRPHIATLRKYTYGKHILAK |
| | | LEKYYMKNGVDLG |
| | | (SEQ ID NO: 480) |
| Extra amino acids | | GRRDRMA |
| between R8′ and | | (SEQ ID NO: 386) |
| Linker | | |
| Linker | | VDTANGS |
| | | (SEQ ID NO: 411) |
| E17 | | GGGTPKAPNLEPPLPEEEKEG |
| | | SDLRPVVIDGSNVAMSHGNKE |
| | | VFSCRGILLAVNWFLERGHTD |
| | | ITVFVPSWRKEQPRPDVPITD |
| | | QHILRELEKKKILVFTPSRRV |
| | | GGKRVVCYDDRFIVKLAYESD |
| | | GIVVSNDTYRDLQGERQEWKR |
| | | FIEERLLMYSFVNDKFMPPDD |
| | | PLGRHGPSLDNFLRKKPLTLE |
| | | (SEQ ID NO: 358) |

TABLE 44
Exemplary 14PUF targeting CAG Fusion Protein

| Plasmid | RNA | |
|---|---|---|
| Element | Recognition | Amino Acid Sequence |
| human pRB-NLS | | KRSAEGSNPPKPLKKLR |
| | | (SEQ ID NO: 442) |
| 14PUF | CAGCAGCAGCA | GRSRLLEDFRNNRYPNLQLREIAGH |
| | GCA | IMEFSQDQHGSRFIQLKLERATPAE |
| | | RQLVFNEILQAAYQLMVDVFGSYVI |
| | | RKFFEFGSLEQKLALAERIRGHVLS |
| | | LALQMYGSRVIEKALEFIPSDQQNE |
| | | MVRELDGHVLKCVKDQNGCHVVQKC |
| | | IECVQPQSLQFIIDAFKGQVFALST |
| | | HPYGSRVIRRILEHCLPDQTLPILE |
| | | ELHQHIMEFSQDQHGSRFIELKLER |
| | | ATPAERQLVFNEILQAAYQLMVDVF |
| | | GCYVIQKFFEFGSLEQKLALAERIR |
| | | GHVLSLALQMYGSYVIRKALEFIPS |
| | | DQQNEMVRELDGHVLKCVKDQNGSY |
| | | VVEKCIECVQPQSLQFIIDAFKGQV |
| | | FALSTHPYGCRVIQRILEHCLPDQT |
| | | LPILEELHQHTEQLVQDQYGSYVIR |
| | | HVLEHGRPEDKSKIVAEIRGHTEQL |
| | | VQDQYGSYVIEHVLEHGRPEDKSKI |
| | | VAEIRGNVLVLSQHKFACNVVQKCV |
| | | THASRTERAVLIDEVCTMNDGPHSA |
| | | LYTMMKDQYASYVVRKMIDVAEPGQ |
| | | RKIVMHKIRPHIATLRKYTYGKHIL |
| | | AKLEKYYMKNGVDLG |
| | | (SEQ ID NO: 481) |
| Linker | | VDTANGS |
| | | (SEQ ID NO: 411) |
| E17 | | GGGTPKAPNLEPPLPEEEKEGSDLR |
| | | PVVIDGSNVAMSHGNKEVFSCRGIL |
| | | LAVNWFLERGHTDITVFVPSWRKEQ |
| | | PRPDVPITDQHILRELEKKKILVFT |
| | | PSRRVGGKRVVCYDDRFIVKLAYES |
| | | DGIVVSNDTYRDLQGERQEWKRFIE |
| | | ERLLMYSFVNDKFMPPDDPLGRHGP |
| | | SLDNFLRKKPLTLE |
| | | (SEQ ID NO: 358) |

TABLE 45
Exemplary 8PUF targeting CAG Fusion Protein

| | RNA | |
|---|---|---|
| Plasmid Element | Recognition | Amino Acid Sequence |
| H2B-NLS | | GKKRKRSRK |
| | | (SEQ ID NO: 438) |
| Extra amino | | GSIVAVSRGM |
| acids between | | (SEQ ID NO: 387) |
| NLS and R1′ | | |
| 8PUF | GCAGCAGC | GRSRLLEDFRNNRYPNLQLREIA |
| | | GHIMEFSQDQHGSRFIRLKLERA |
| | | TPAERQLVFNEILQAAYQLMVDV |
| | | FGSYVIEKFFEFGSLEQKLALAE |
| | | RIRGHVLSLALQMYGCRVIQKAL |
| | | EFIPSDQQNEMVRELDGHVLKCV |
| | | KDQNGSYVVRKCIECVQPQSLQF |
| | | IIDAFKGQVFALSTHPYGSRVIE |
| | | RILEHCLPDQTLPILEELHQHTE |
| | | QLVQDQYGCYVIQHVLEHGRPED |
| | | KSKIVAEIRGNVLVLSQHKFASY |
| | | VVRKCVTHASRTERAVLIDEVCT |
| | | MNDGPHSALYTMMKDQYASYVVE |
| | | KMIDVAEPGQRKIVMHKIRPHIA |
| | | TLRKYTYGKHILAKLEKYYMKNG |
| | | VDLG |
| | | (SEQ ID NO: 549) |
| Extra amino | | GRRDRMA |
| acids between | | (SEQ ID NO: 386) |
| R8′and Linker | | |
| Linker | | VDTANGS |
| | | (SEQ ID NO: 411) |
| E17 | | GGGTPKAPNLEPPLPEEEKEGSD |
| | | LRPVVIDGSNVAMSHGNKEVFSC |
| | | RGILLAVNWFLERGHTDITVFVP |
| | | SWRKEQPRPDVPITDQHILRELE |
| | | KKKILVFTPSRRVGGKRVVCYDD |
| | | RFIVKLAYESDGIVVSNDTYRDL |
| | | QGERQEWKRFIEERLLMYSFVND |
| | | KFMPPDDPLGRHGPSLDNFLRKK |
| | | PLTLE |
| | | (SEQ ID NO: 358) |

TABLE 46
Exemplary 8PUF targeting CAG Fusion Protein

| | RNA | |
|---|---|---|
| Plasmid Element | Recognition | Amino Acid Sequence |
| RB-NLS | | DRVLKRSAEGSNPPKPLKKLR |
| | | (SEQ ID NO: 543) |
| Linker | | GGS |
| | | (SEQ ID NO: 410) |
| Extra amino | | IVAVSRGM |
| acids between | | (SEQ ID NO: 388) |
| NLS and R1′ | | |
| 8PUF | GCAGCAGC | GRSRLLEDFRNNRYPNLQLREI |
| | | AGHIMEFSQDQHGSRFIRLKLE |
| | | RATPAERQLVFNEILQAAYQLM |
| | | VDVFGSYVIEKFFEFGSLEQKL |
| | | ALAERIRGHVLSLALQMYGCRV |
| | | IQKALEFIPSDQQNEMVRELDG |
| | | HVLKCVKDQNGSYVVRKCIECV |
| | | QPQSLQFIIDAFKGQVFALSTH |
| | | PYGSRVIERILEHCLPDQTLPI |
| | | LEELHQHTEQLVQDQYGCYVIQ |
| | | HVLEHGRPEDKSKIVAEIRGNV |
| | | LVLSQHKFASYVVRKCVTHASR |
| | | TERAVLIDEVCTMNDGPHSALY |
| | | TMMKDQYASYVVEKMIDVAEPG |
| | | QRKIVMHKIRPHIATLRKYTYG |
| | | KHILAKLEKYYMKNGVDLG |
| | | (SEQ ID NO: 549) |
| Extra amino | | GRRDRMA |
| acids between | | (SEQ ID NO: 386) |
| R8′and Linker | | |
| Linker | | VDTANGS |
| | | (SEQ ID NO: 411) |
| E17 | | GGGTPKAPNLEPPLPEEEKEGS |
| | | DLRPVVIDGSNVAMSHGNKEVF |
| | | SCRGILLAVNWFLERGHTDITV |
| | | FVPSWRKEQPRPDVPITDQHIL |
| | | RELEKKKILVFTPSRRVGGKRV |
| | | VCYDDRFIVKLAYESDGIVVSN |
| | | DTYRDLQGERQEWKRFIEERLL |
| | | MYSFVNDKFMPPDDPLGRHGPS |
| | | LDNFLRKKPLTLE |
| | | (SEQ ID NO: 358) |

TABLE 47
Exemplary 8PUF targeting CAG Fusion Protein

| Plasmid | RNA | |
|---|---|---|
| Element | Recognition | Amino Acid Sequence |
| RB-NLS | | DRVLKRSAEGSNPPKPLKKLR |
| | | (SEQ ID NO: 543) |
| Linker | | GGS |
| | | (SEQ ID NO: 410) |
| 8PUF | GCAGCAGC | GRSRLLEDFRNNRYPNLQLREIAGHIMEFS |
| | | QDQHGSRFIRLKLERATPAERQLVFNEILQ |
| | | AAYQLMVDVFGSYVIEKFFEFGSLEQKLAL |
| | | AERIRGHVLSLALQMYGCRVIQKALEFIPS |
| | | DQQNEMVRELDGHVLKCVKDQNGSHVVRKC |
| | | IECVQPQSLQFIIDAFKGQVFALSTHPYGS |
| | | RVIERILEHCLPDQTLPILEELHQHTEQLV |
| | | QDQYGCYVIQHVLEHGRPEDKSKIVAEIRG |
| | | NVLVLSQHKFASYVVRKCVTHASRTERAVL |
| | | IDEVCTMNDGPHSALYTMMKDQYASYVVEK |
| | | MIDVAEPGQRKIVMHKIRPHIATLRKYTYG |
| | | KHILAKLEKYYMKNGVDLG |
| | | (SEQ ID NO: 568) |
| Linker | | VDTANGS |
| | | (SEQ ID NO: 411) |
| E17 | | GGGTPKAPNLEPPLPEEEKEGSDLRPVVID |
| | | GSNVAMSHGNKEVFSCRGILLAVNWFLERG |
| | | HTDITVFVPSWRKEQPRPDVPITDQHILRE |
| | | LEKKKILVFTPSRRVGGKRVVCYDDRFIVK |
| | | LAYESDGIVVSNDTYRDLQGERQEWKRFIE |
| | | ERLLMYSFVNDKFMPPDDPLGRHGPSLDNF |
| | | LRKKPLTLE |
| | | (SEQ ID NO: 358) |

TABLE 48
Exemplary 8PUF targeting CAG Fusion Protein

| | RNA | |
|---|---|---|
| Plasmid Element | Recognition | Amino Acid Sequence |
| H2B-NLS | | GKKRKRSRK |
| | | (SEQ ID NO: 438) |
| Extra amino | | GSIVAVSRGM |
| acids between | | (SEQ ID NO: 387) |
| NLS and R1′ | | |
| 8PUF | GCAGCAGC | GRSRLLEDFRNNRYPNLQLREI |
| | | AGHIMEFSQDQHGSRFIRLKLE |
| | | RATPAERQLVFNEILQAAYQLM |
| | | VDVFGSYVIEKFFEFGSLEQKL |
| | | ALAERIRGHVLSLALQMYGCRV |
| | | IQKALEFIPSDQQNEMVRELDG |
| | | HVLKCVKDQNGSYVVRKCIECV |
| | | QPQSLQFIIDAFKGQVFALSTH |
| | | PYGSRVIERILEHCLPDQTLPI |
| | | LEELHQHTEQLVQDQYGCYVIQ |
| | | HVLEHGRPEDKSKIVAEIRGNV |
| | | LVLSQHKFASYVVRKCVTHASR |
| | | TERAVLIDEVCTMNDGPHSALY |
| | | TMMKDQYASYVVEKMIDVAEPG |
| | | QRKIVMHKIRPHIATLRKYTYG |
| | | KHILAKLEKYYMKNGVDLG |
| | | (SEQ ID NO: 549) |
| Extra amino | | GRRDRMA |
| acids between | | (SEQ ID NO: 386) |
| R8′and Linker | | |
| Linker | | VDTANGS |
| | | (SEQ ID NO: 411) |
| E17 | | GGGTPKAPNLEPPLPEEEKEGS |
| | | DLRPVVIDGSNVAMSHGNKEVF |
| | | SCRGILLAVNWFLERGHTDITV |
| | | FVPSWRKEQPRPDVPITDQHIL |
| | | RELEKKKILVFTPSRRVGGKRV |
| | | VCYDDRFIVKLAYESDGIVVSN |
| | | DTYRDLQGERQEWKRFIEERLL |
| | | MYSFVNDKFMPPDDPLGRHGPS |
| | | LDNFLRKKPLTLE |
| | | (SEQ ID NO: 358) |
| PKI-NES | | LALKLAGLDI |
| | | (SEQ ID NO: 545) |

TABLE 49
Exemplary 8PUF targeting CAG Fusion Protein

| | RNA | |
|---|---|---|
| Plasmid Element | Recognition | Amino Acid Sequence |
| H2B-NLS | | GKKRKRSRK (SEQ ID NO: 438) |
| Extra amino acids | | GSIVAVSRG (SEQ ID NO: 385) |
| between NLS and R1′ | | |
| 8PUF | GCAGCAGC | GRSRLLEDFRNNRYPNLQLREIAGHIMEFSQDQHGSRFIRLKLERATPAERQLVFN |
| | | EILQAAYQLMVDVFGSYVIEKFFEFGSLEQKLALAERIRGHVLSLALQMYGCRVIQ |
| | | KALEFIPSDQQNEMVRELDGHVLKCVKDQNGSYVVRKCIECVQPQSLQFIIDAFKG |
| | | QVFALSTHPYGSRVIERILEHCLPDQTLPILEELHQHTEQLVQDQYGCYVIQHVLE |
| | | HGRPEDKSKIVAEIRGNVLVLSQHKFASYVVRKCVTHASRTERAVLIDEVCTMNDG |
| | | PHSALYTMMKDQYASYVVEKMIDVAEPGQRKIVMHKIRPHIATLRKYTYGKHILAK |
| | | LEKYYMKNGVDLG (SEQ ID NO: 549) |
| Extra amino acids | | GRRDRMA (SEQ ID NO: 386) |
| between R8′ and | | |
| Linker | | |
| Linker | | VDTANGS (SEQ ID NO: 411) |
| E17 | | GGGTPKAPNLEPPLPEEEKEGSDLRPVVIDGSNVAMSHGNKEVFSCRGILLAVNWF |
| | | LERGHTDITVFVPSWRKEQPRPDVPITDQHILRELEKKKILVFTPSRRVGGKRVVC |
| | | YDDRFIVKLAYESDGIVVSNDTYRDLQGERQEWKRFIEERLLMYSFVNDKFMPPDD |
| | | PLGRHGPSLDNFLRKKPLTLE (SEQ ID NO: 358) |
| Human PKI NES | | LALKLAGLDI (SEQ ID NO: 545) |

8PUF targeting CAGf2 w/ stacking mutations (C binding mutant) w/ or w/out endonuclease

| | Protein | | | |
|---|---|---|---|---|
| Construct | Type | Elements | Sequence | Amino Acid Sequence |
| n/a | 8PUF | N-terminal | GCAGCAGC | GRSRLLEDFRNNRYPNLQLREIAGHIMEFSQ |
| | | 8PUF with or | | DQHGSFFIRLKLERATPAERQLVFNEILQAA |
| | | without C- | | YQLMVDVFGSYVIEKFFEFGSLEQKLALAER |
| | | terminal E17 | | IRGHVLSLALQMYGCRVIQKALEFIPSDQQN |
| | | with linker | | EMVRELDGHVLKCVKDQNGSFVVRKCIECVQ |
| | | between | | PQSLQFIIDAFKGQVFALSTHPYGSRVIERI |
| | | 8PUF and E17 | | LEHCLPDQTLPILEELHQHTEQLVQDQYGCY |
| | | | | VIQHVLEHGRPEDKSKIVAEIRGNVLVLSQH |
| | | | | KFASFVVRKCVTHASRTERAVLIDEVCTMND |
| | | | | GPHSALYTMMKDQYASYVVEKMIDVAEPGQR |
| | | | | KIVMHKIRPHIATLRKYTYGKHILAKLEKYY |
| | | | | MKNGVDLG (SEQ ID NO: 658) |

Amino acid sequences of transgene elements in order N-terminal to C-terminal
(for *cleaving or blocking):

| Plasmid Element | Amino Acid Sequences |
|---|---|
| 8PUF | GRSRLLEDFRNNRYPNLQLREIAGHIMEFSQDQHGSFFIRLKLERATPAERQLVFNEILQAAY |
| | QLMVDVFGSYVIEKFFEFGSLEQKLALAERIRGHVLSLALQMYGCRVIQKALEFIPSDQQNEM |
| | VRELDGHVLKCVKDQNGSFVVRKCIECVQPQSLQFIIDAFKGQVFALSTHPYGSRVIERILEH |
| | CLPDQTLPILEELHQHTEQLVQDQYGCYVIQHVLEHGRPEDKSKIVAEIRGNVLVLSQHKFAS |
| | FVVRKCVTHASRTERAVLIDEVCTMNDGPHSALYTMMKDQYASYVVEKMIDVAEPGQRKIVMH |
| | KIRPHIATLRKYTYGKHILAKLEKYYMKNGVDLG (SEQ ID NO: 658) |
| *Linker | VDTANGS (SEQ ID NO: 411) |
| *E17 | GGGTPKAPNLEPPLPEEEKEGSDLRPVVIDGSNVAMSHGNKEVFSCRGILLAVNWFLERGHTD |
| | ITVFVPSWRKEQPRPDVPITDQHILRELEKKKILVFTPSRRVGGKRVVCYDDRFIVKLAYESD |
| | GIVVSNDTYRDLQGERQEWKRFIEERLLMYSFVNDKFMPPDDPLGRHGPSLDNFLRKKPLTLE |
| | (SEQ ID NO: 358) |

### Vectors

[0713] In some embodiments of the compositions and methods of the disclosure, a vector comprises a guide RNA of the disclosure. In some embodiments, the vector comprises at least one guide RNA of the disclosure. In some embodiments, the vector comprises one or more guide RNA(s) of the disclosure. In some embodiments, the vector comprises two or more guide RNAs of the disclosure. In one embodiment, the vector comprises three guide RNAs. In one embodiment, the vector comprises four guide RNAs. In some embodiments, the vector further comprises a guided or non-guided RNA-binding protein of the disclosure. In some embodiments, the vector further comprises an RNA-binding fusion protein of the disclosure. In some embodiments, the fusion protein comprises a first RNA binding protein and a second RNA binding protein. In some embodiments, the RNA-guided RNA-binding systems comprising an RNA-binding protein and a gRNA are in a single vector. In a particular embodiment, the single vector comprises the RNA-guided RNA-binding systems which are Cas13d RNA-guided RNA-binding systems or catalytic deactivated Cas13d (dCas13d) RNA-guided RNA-binding systems. In one embodiment, the single vector comprises the Cas13d RNA-guided RNA-binding systems which are CasRx or dCasRx RNA-guided RNA-binding systems. In another embodiment, the single vector comprises a non-guided RNA-binding system comprising a PUF or PUMBY-based protein fused with a nuclease domain from ZC3H12A, such as E17 (SEQ ID NO: 358). In another embodiment, the single vector comprises a dCas13d RNA-binding system fused with a nuclease domain from ZC3H12A, such as E17 (SEQ ID NO: 359).

[0714] In some embodiments of the compositions and methods of the disclosure, a first vector comprises a guide RNA of the disclosure and a second vector comprises an RNA-binding protein or RNA-binding fusion protein of the disclosure. In some embodiments, the first vector comprises at least one guide RNA of the disclosure. In some embodiments, the first vector comprises one or more guide RNA(s) of the disclosure. In some embodiments, the first vector comprises two or more guide RNA(s) of the disclosure. In some embodiments, the fusion protein comprises a first RNA binding protein and a second RNA binding protein. In some embodiments, the first vector and the second vector are identical vectors or vector serotypes. In some embodiments, the first vector and the second vector are not identical vectors or vector serotypes. In some embodiments of the compositions and methods of the disclosure, the RNA-binding systems capable of targeting toxic CAG RNA repeats are in a single vector.

[0715] One type of vector is a “plasmid,” which refers to a circular double stranded DNA loop into which additional DNA segments can be inserted, such as by standard molecular cloning techniques. Another type of vector is a viral vector, wherein virally-derived DNA or RNA sequences are present in the vector for packaging into a virus (e.g., retroviruses, replication defective retroviruses, adenoviruses, replication defective adenoviruses, and adeno-associated viruses). Viral vectors also include polynucleotides carried by a virus for transfection into a host cell. In some embodiments, the vector is a lentivirus (such as an integration-deficient lentiviral vector) or adeno-associated viral (AAV) vector. Vectors are capable of autonomous replication in a host cell into which they are introduced such as e.g., bacterial vectors having a bacterial origin of replication and episomal mammalian vectors and other vectors such as, e.g., non-episomal mammalian vectors, are integrated into the genome of a host cell upon introduction into the host cell, and thereby are replicated along with the host genome.

[0716] In some embodiments, vectors such as e.g., expression vectors, are capable of directing the expression of genes to which they are operatively-linked. Common expression vectors are often in the form of plasmids. In some embodiments, recombinant expression vectors comprise a nucleic acid provided herein such as e.g., a guide RNA which can be expressed from a DNA sequence, and a nucleic acid encoding a Cas 13d protein, in a form suitable for expression of a protein in a host cell. Recombinant expression vectors include one or more regulatory elements, which may be selected on the basis of the host cells to be used for expression, that is operatively-linked to the nucleic acid sequence to be expressed. Within a recombinant expression vector, “operably linked” is intended to mean that the nucleotide sequence of interest is linked to the regulatory element(s) in a manner that allows for expression of the nucleotide sequence such as e.g., in an in vitro transcription/translation system or in a host cell when the vector is introduced into the host cell. Certain embodiments of a vector depend on factors such as the choice of the host cell to be transformed, and the level of expression desired. A vector can be introduced into host cells to thereby produce transcripts, proteins, or peptides, including fusion proteins or peptides, encoded by nucleic acids as described herein such as, e.g., CRISPR transcripts, proteins, enzymes, mutant forms thereof, fusion proteins thereof, etc.

[0717] In some embodiments of the compositions and methods of the disclosure, a vector of the disclosure is a viral vector. In some embodiments, the viral vector comprises a sequence isolated or derived from a retrovirus. In some embodiments, the viral vector comprises a sequence isolated or derived from a lentivirus. In some embodiments, the viral vector comprises a sequence isolated or derived from an adenovirus. In some embodiments, the viral vector comprises a sequence isolated or derived from an adeno-associated virus (AAV). In some embodiments, the viral vector is replication incompetent. In some embodiments, the viral vector is isolated or recombinant. In some embodiments, the viral vector is self-complementary.

[0718] The term “adeno-associated virus” or “AAV” as used herein refers to a member of the class of viruses associated with this name and belonging to the genus Dependoparvovirus, family Parvoviridae. Adeno-associated virus is a single-stranded DNA virus that grows in cells in which certain functions are provided by a co-infecting helper virus. General information and reviews of AAV can be found in, for example, Carter, 1989, Handbook of Parvoviruses, Vol. 1, pp. 169-228, and Berns, 1990, Virology, pp. 1743-1764, Raven Press, (New York). It is fully expected that the same principles described in these reviews will be applicable to additional AAV serotypes characterized after the publication dates of the reviews because it is well known that the various serotypes are quite closely related, both structurally and functionally, even at the genetic level. (See, for example, Blacklowe, 1988, pp. 165-174 of Parvoviruses and Human Disease, J. R. Pattison, ed.; and Rose, Comprehensive Virology 3: 1-61 (1974)). For example, all AAV serotypes apparently exhibit very similar replication properties mediated by homologous rep genes; and all bear three related capsid proteins such as those expressed in AAV2. The degree of relatedness is further suggested by heteroduplex analysis which reveals extensive cross-hybridization between serotypes along the length of the genome; and the presence of analogous self-annealing segments at the termini that correspond to “inverted terminal repeat sequences” (ITRs). The similar infectivity patterns also suggest that the replication functions in each serotype are under similar regulatory control. Multiple serotypes of this virus are known to be suitable for gene delivery; all known serotypes can infect cells from various tissue types.

[0719] AAV possesses unique features that make it attractive as a vector for delivering foreign DNA to cells, for example, in gene therapy. AAV infection of cells in culture is noncytopathic, and natural infection of humans and other animals is silent and asymptomatic. Moreover, AAV infects many mammalian cells allowing the possibility of targeting many different tissues in vivo. Moreover, AAV transduces slowly dividing and non-dividing cells, and can persist essentially for the lifetime of those cells as a transcriptionally active nuclear episome (extrachromosomal element). The AAV proviral genome is inserted as cloned DNA in plasmids, which makes construction of recombinant genomes feasible. Furthermore, because the signals directing AAV replication and genome encapsidation are contained within the ITRs of the AAV genome, some or all of the internal approximately 4.3 kb of the genome (encoding replication and structural capsid proteins, rep-cap) may be replaced with foreign DNA to generate AAV vectors. The rep and cap proteins may be provided in trans. Another significant feature of AAV is that it is an extremely stable and hearty virus. It easily withstands the conditions used to inactivate adenovirus (56° to 65° C. for several hours), making cold preservation of AAV less critical. AAV may even be lyophilized. Finally, AAV-infected cells are not resistant to superinfection.

[0720] Recombinant AAV (rAAV) genomes of the invention comprise, consist essentially of, or consist of a nucleic acid molecule encoding a CAG-repeat targeting composition (such as a PUF, PUMBY, or RNA-guided protein) and one or more AAV ITRs flanking the nucleic acid molecule. Production of pseudotyped rAAV is disclosed in, for example, WO2001083692. Other types of rAAV variants, for example rAAV with capsid mutations, are also contemplated. See, e.g., Marsic et al., Molecular Therapy, 22(11): 1900-1909 (2014). The nucleotide sequences of the genomes of various AAV serotypes are known in the art.

[0721] In some embodiments of the compositions and methods of the disclosure, the viral vector comprises a sequence isolated or derived from an adeno-associated virus (AAV). In some embodiments, the viral vector comprises an inverted terminal repeat sequence or a capsid sequence that is isolated or derived from an AAV of serotype AAV1, AAV2, AAV3, AAV4, AAV5, AAV6, AAV7, AAV8, AAV9, AAV10 (AAVrh10), AAV11 or AAV12. In some embodiments, the AAV serotype is AAVrh.74. In one embodiment, the AAV vector comprises a modified capsid. In one embodiment the AAV vector is an AAV2-Tyr mutant vector. In one embodiment the AAV vector comprises a capsid with a non-tyrosine amino acid at a position that corresponds to a surface-exposed tyrosine residue in position Tyr252, Tyr272, Tyr275, Tyr281, Tyr508, Tyr612, Tyr704, Tyr720, Tyr730 or Tyr673 of wild-type AAV2. See also WO 2008/124724 incorporated herein in its entirety. In some embodiments, the AAV vector comprises an engineered capsid. AAV vectors comprising engineered capsids include without limitation, AAV2.7m8, AAV9.7m8, AAV2 2tYF, and AAV8 Y733F). In some embodiments, the viral vector is replication incompetent. In some embodiments, the viral vector is isolated or recombinant (rAAV). In some embodiments, the viral vector is self-complementary (scAAV).

[0722] In some embodiments of the compositions and methods of the disclosure, a vector of the disclosure is a non-viral vector. In some embodiments, the vector comprises or consists of a nanoparticle, a micelle, a liposome or lipoplex, a polymersome, a polyplex or a dendrimer. In some embodiments, the vector is an expression vector or recombinant expression system. As used herein, the term “recombinant expression system” refers to a genetic construct for the expression of certain genetic material formed by recombination.

[0723] In some embodiments of the compositions and methods of the disclosure, an expression vector, viral vector or non-viral vector provided herein, includes without limitation, an expression control element. An “expression control element” as used herein refers to any sequence that regulates the expression of a coding sequence, such as a gene. Exemplary expression control elements include but are not limited to promoters, enhancers, microRNAs, post-transcriptional regulatory elements, polyadenylation signal sequences, and introns. Expression control elements may be constitutive, inducible, repressible, or tissue-specific, for example. A “promoter” is a control sequence that is a region of a polynucleotide sequence at which initiation and rate of transcription are controlled. It may contain genetic elements at which regulatory proteins and molecules may bind such as RNA polymerase and other transcription factors. In some embodiments, expression control by a promoter is tissue-specific. In some embodiments, expression control by a promoter is constitutive or ubiquitous. Non-limiting exemplary promoters include a Pol III promoter such as, e.g., U6 and H1 promoters and/or a Pol II promoter e.g., SV40, CMV (optionally including the CMV enhancer), RSV (Rous Sarcoma Virus LTR promoter (optionally including RSV enhancer), CBA (hybrid CMV enhancer/chicken β-actin), CAG (hybrid CMV enhancer fused to chicken β-actin), truncated CAG, Cbh (hybrid CBA), EF-1a (human elongation factor alpha-1) or EFS (short intron-less EF-1 alpha), PGK (phosphoglycerol kinase), CEF (chicken embryo fibroblasts), UBC (ubiquitinC), GUSB (lysosomal enzyme beta-glucuronidase), UCOE (ubiquitous chromatin opening element), hAAT (alpha-1 antitrypsin), TBG (thyroxine binding globulin), Desmin (full-length (SEQ ID NO: 654) or truncated (SEQ ID NO: 655)), MCK (muscle creatine kinase), C5-12 (synthetic muscle promoter), CK8e (creatin kinase 8), NSE (neuron-specific enolase), Synapsin, Synapsin-1 (SYN-1), opsin, PDGF (platelet-derived growth factor), PDGF-A, MecP2 (methyl CpG-binding protein 2), CaMKII (Calcium/Calmodulin-dependent protein kinase II), mGluR2 (metabotropic glutamate receptor 2), NFL (neurofilament light), NFH (neurofilament heavy), nβ2, PPE (rat preproenkephalin), ENK (preproenkephalin), Preproenkephalin-neurofilament chimeric promoter, EAAT2 (glutamate transporter), GFAP (glial fibrillary acidic protein), MBP (myelin basic protein), human rhodopsin kinase promoter (hGRKi), β-actin promoter, dihydrofolate reductase promoter, MHCK7 (hybrid promoter of enhancer/promoter regions of muscle creatine kinase and alpha myosin heavy-chain genes) and combinations thereof. An “enhancer” is a region of DNA that can be bound by activating proteins to increase the likelihood or frequency of transcription. Non-limiting exemplary enhancers and posttranscriptional regulatory elements include the CMV enhancer, MCK enhancer, R-U5′ segment in LTR of HTLV-1, SV40 enhancer, the intron sequence between exons 2 and 3 of rabbit β-globin, and Woodchuck Hepatitis Virus (WHP) Posttranscriptional Regulatory Element (WPRE). In some embodiments an intron is used to enhance promoter activity such as a UBB intron. In some embodiments, the UBB intron is used with an EFS promoter.

[0724] In some embodiments of the compositions and methods of the disclosure, an expression vector, viral vector or non-viral vector provided herein, includes without limitation, vector elements such as an IRES or 2A peptide sites for configuration of “multicistronic” or “polycistronic” or “bicistronic” or tricistronic” constructs, i.e., having double or triple or multiple coding areas or exons, and as such will have the capability to express from mRNA two or more proteins from a single construct. Multicistronic vectors simultaneously express two or more separate proteins from the same mRNA. The two strategies most widely used for constructing multicistronic configurations are through the use of an IRES or a 2A self-cleaving site. An “IRES” refers to an internal ribosome entry site or portion thereof of viral, prokaryotic, or eukaryotic origin which are used within polycistronic vector constructs. In some embodiments, an IRES is an RNA element that allows for translation initiation in a cap-independent manner. The term “self-cleaving peptides” or “sequences encoding self-cleaving peptides” or “2A self-cleaving site” refer to linking sequences which are used within vector constructs to incorporate sites to promote ribosomal skipping and thus to generate two polypeptides from a single promoter, such self-cleaving peptides include without limitation, T2A, and P2A peptides or other sequences encoding the self-cleaving peptides.

[0725] In one embodiment, exemplary vector configurations are shown in FIGS. 4A-4C. Exemplary vector configurations comprise a promoter or regulatory sequence (promoter/enhancer combination) driving the expression of the nucleic acid encoding the CAG-targeting PUF-endonuclease fusion. In another embodiment, a vector configuration comprises a promoter driving expression of the RNA-guided Cas RNase RNA-binding protein, or dCas protein fusion in operable linkage with a second promoter driving expressing of a cognate gRNA. In another embodiment, the vector configuration comprises a linker and one or more tags.

[0726] In some embodiments, the vector is a viral vector. In some embodiments, the vector is an adenoviral vector, an adeno-associated viral (AAV) vector, or a lentiviral vector. In some embodiments, the vector is a retroviral vector, an adenoviral/retroviral chimera vector, a herpes simplex viral I or II vector, a parvoviral vector, a reticuloendotheliosis viral vector, a polioviral vector, a papillomaviral vector, a vaccinia viral vector, or any hybrid or chimeric vector incorporating favorable aspects of two or more viral vectors. In some embodiments, the vector further comprises one or more expression control elements operably linked to the polynucleotide. In some embodiments, the vector further comprises one or more selectable markers. In some embodiments, the AAV vector has low toxicity. In some embodiments, the AAV vector does not incorporate into the host genome, thereby having a low probability of causing insertional mutagenesis. In some embodiments, the AAV vector can encode a range of total polynucleotides from 4.5 kb to 4.75 kb. In some embodiments, exemplary AAV vectors that may be used in any of the herein described compositions, systems, methods, and kits can include an AAV1 vector, a modified AAV1 vector, an AAV2 vector, a modified AAV2 vector, an AAV2-Tyr mutant vector, an AAV3 vector, a modified AAV3 vector, an AAV4 vector, a modified AAV4 vector, an AAV5 vector, a modified AAV5 vector, an AAV6 vector, a modified AAV6 vector, an AAV7 vector, a modified AAV7 vector, an AAV8 vector, an AAV9 vector, an AAV.rh10 vector, a modified AAV.rh10 vector, an AAVrh.74, an AAV.rh32/33 vector, a modified AAV.rh32/33 vector, an AAV.rh43 vector, a modified AAV.rh43 vector, an AAV.rh64R1 vector, and a modified AAV.rh64R1 vector, an AAV-Tyr mutant vector, and any combinations or equivalents thereof. In some embodiments, the lentiviral vector is an integrase-competent lentiviral vector (ICLV). In some embodiments, the lentiviral vector can refer to the transgene plasmid vector as well as the transgene plasmid vector in conjunction with related plasmids (e.g., a packaging plasmid, a rev expressing plasmid, an envelope plasmid) as well as a lentiviral-based particle capable of introducing exogenous nucleic acid into a cell through a viral or viral-like entry mechanism. Lentiviral vectors are well-known in the art (see, e.g., Trono D. (2002) Lentiviral vectors, New York: Spring-Verlag Berlin Heidelberg and Durand et al. (2011) Viruses 3(2):132-159 doi: 10.3390/v3020132). In some embodiments, exemplary lentiviral vectors that may be used in any of the herein described compositions, systems, methods, and kits can include a human immunodeficiency virus (HIV) 1 vector, a modified human immunodeficiency virus (HIV) 1 vector, a human immunodeficiency virus (HIV) 2 vector, a modified human immunodeficiency virus (HIV) 2 vector, a sooty mangabey simian immunodeficiency virus (SIV_{SM}) vector, a modified sooty mangabey simian immunodeficiency virus (SIV_{SM}) vector, a African green monkey simian immunodeficiency virus (SIV_{AGM}) vector, a modified African green monkey simian immunodeficiency virus (SIV_{AGM}) vector, an equine infectious anemia virus (EIAV) vector, a modified equine infectious anemia virus (EIAV) vector, a feline immunodeficiency virus (FIV) vector, a modified feline immunodeficiency virus (FIV) vector, a Visna/maedi virus (VNV/VMV) vector, a modified Visna/maedi virus (VNV/VMV) vector, a caprine arthritis-encephalitis virus (CAEV) vector, a modified caprine arthritis-encephalitis virus (CAEV) vector, a bovine immunodeficiency virus (BIV), or a modified bovine immunodeficiency virus (BIV).

### Nucleic Acids

[0727] Provided herein are the nucleic acid sequences encoding RNA-binding CAG repeat-targeting systems disclosed herein for use in gene transfer and expression techniques described herein. It should be understood, although not always explicitly stated that the sequences provided herein can be used to provide the expression product as well as substantially identical sequences that produce a protein that has the same biological properties. These “biologically equivalent” or “biologically active” or “equivalent” polypeptides are encoded by equivalent polynucleotides as described herein. They may possess at least 60%, or alternatively, at least 65%, or alternatively, at least 70%, or alternatively, at least 75%, or alternatively, at least 80%, or alternatively at least 85%, or alternatively at least 90%, or alternatively at least 95% or alternatively at least 98%, identical primary amino acid sequence to the reference polypeptide when compared using sequence identity methods run under default conditions. Specific polypeptide sequences are provided as examples of particular embodiments. Modifications to the sequences to amino acids with alternate amino acids that have similar charge. Additionally, an equivalent polynucleotide is one that hybridizes under stringent conditions to the reference polynucleotide or its complement or in reference to a polypeptide, a polypeptide encoded by a polynucleotide that hybridizes to the reference encoding polynucleotide under stringent conditions or its complementary strand. Alternatively, an equivalent polypeptide or protein is one that is expressed from an equivalent polynucleotide.

[0728] The nucleic acid sequences (e.g., polynucleotide sequences) disclosed herein may be codon-optimized which is a technique well known in the art. In some embodiments disclosed herein, exemplary Cas sequences, such as e.g., a nucleic acid sequence encoding SEQ ID NO: 92 (Cas13d known as CasRx) or the nucleic acid sequence encoding SEQ ID NO: 298 (Cas13d known as CasRx), are codon optimized for expression in human cells. Codon optimization refers to the fact that different cells differ in their usage of particular codons. This codon bias corresponds to a bias in the relative abundance of particular tRNAs in the cell type. By altering the codons in the sequence to match with the relative abundance of corresponding tRNAs, it is possible to increase expression. It is also possible to decrease expression by deliberately choosing codons for which the corresponding tRNAs are known to be rare in a particular cell type. Codon usage tables are known in the art for mammalian cells, as well as for a variety of other organisms. Based on the genetic code, nucleic acid sequences coding for, e.g., a Cas protein, can be generated. In some embodiments, such a sequence is optimized for expression in a host or target cell, such as a host cell used to express the Cas protein or a cell in which the disclosed methods are practiced (such as in a mammalian cell, e.g., a human cell). Codon preferences and codon usage tables for a particular species can be used to engineer isolated nucleic acid molecules encoding a Cas protein (such as one encoding a protein having at least 80%, at least 85%, at least 90%, at least 92%, at least 95%, at least 96%, at least 97%, at least 98%, at least 99%, or 100% sequence identity to its corresponding wild-type protein) that takes advantage of the codon usage preferences of that particular species. For example, the Cas proteins disclosed herein can be designed to have codons that are preferentially used by a particular organism of interest. In one example, a Cas nucleic acid sequence is optimized for expression in human cells, such as one having at least 70%, at least 80%, at least 85%, at least 90%, at least 92%, at least 95%, at least 98%, or at least 99% sequence identity to its corresponding wild-type or originating nucleic acid sequence. In some embodiments, an isolated nucleic acid molecule encoding at least one Cas protein (which can be part of a vector) includes at least one Cas protein coding sequence that is codon optimized for expression in a eukaryotic cell, or at least one Cas protein coding sequence codon optimized for expression in a human cell. In one embodiment, such a codon optimized Cas coding sequence has at least 80%, at least 85%, at least 90%, at least 92%, at least 95%, at least 96%, at least 97%, at least 98%, at least 99%, or 100% sequence identity to its corresponding wild-type or originating sequence. In another embodiment, a eukaryotic cell codon optimized nucleic acid sequence encodes a Cas protein having at least 85%, at least 90%, at least 92%, at least 95%, at least 96%, at least 97%, at least 98%, at least 99%, or 100% sequence identity to its corresponding wild-type or originating protein. In another embodiment, a variety of clones containing functionally equivalent nucleic acids may be routinely generated, such as nucleic acids which differ in sequence but which encode the same Cas protein sequence. Silent mutations in the coding sequence result from the degeneracy (i.e., redundancy) of the genetic code, whereby more than one codon can encode the same amino acid residue. Thus, for example, leucine can be encoded by CTT, CTC, CTA, CTG, TTA, or TTG; serine can be encoded by TCT, TCC, TCA, TCG, AGT, or AGC; asparagine can be encoded by AAT or AAC; aspartic acid can be encoded by GAT or GAC; cysteine can be encoded by TGT or TGC; alanine can be encoded by GCT, GCC, GCA, or GCG; glutamine can be encoded by CAA or CAG; tyrosine can be encoded by TAT or TAC; and isoleucine can be encoded by ATT, ATC, or ATA. Tables showing the standard genetic code can be found in various sources (see, for example, Stryer, 1988, Biochemistry, 3.sup.rd Edition, W.H. 5 Freeman and Co., NY).

[0729] “Hybridization” refers to a reaction in which one or more polynucleotides react to form a complex that is stabilized via hydrogen bonding between the bases of the nucleotide residues. The hydrogen bonding may occur by Watson-Crick base pairing, Hoogstein binding, or in any other sequence-specific manner. The complex may comprise two strands forming a duplex structure, three or more strands forming a multi-stranded complex, a single self-hybridizing strand, or any combination of these. A hybridization reaction may constitute a step in a more extensive process, such as the initiation of a PC reaction, or the enzymatic cleavage of a polynucleotide by a ribozyme.

[0730] Examples of stringent hybridization conditions include: incubation temperatures of about 25° C. to about 37° C.; hybridization buffer concentrations of about 6×SSC to about 10×SSC; formamide concentrations of about 0% to about 25%; and wash solutions from about 4×SSC to about 8×SSC. Examples of moderate hybridization conditions include: incubation temperatures of about 40° C. to about 50° C.; buffer concentrations of about 9×SSC to about 2×SSC; formamide concentrations of about 30% to about 50%; and wash solutions of about 5×SSC to about 2×SSC. Examples of high stringency conditions include: incubation temperatures of about 55° C. to about 68° C.; buffer concentrations of about 1×SSC to about 0.1×SSC; formamide concentrations of about 55% to about 75%; and wash solutions of about 1×SSC, 0.1×SSC, or deionized water. In general, hybridization incubation times are from 5 minutes to 24 hours, with 1, 2, or more washing steps, and wash incubation times are about 1, 2, or 15 minutes. SSC is 0.15 M NaCl and 15 mM citrate buffer. It is understood that equivalents of SSC using other buffer systems can be employed.

[0731] “Homology” or “identity” or “similarity” refers to sequence similarity between two peptides or between two nucleic acid molecules. Homology can be determined by comparing a position in each sequence which may be aligned for purposes of comparison. When a position in the compared sequence is occupied by the same base or amino acid, then the molecules are homologous at that position. A degree of homology between sequences is a function of the number of matching or homologous positions shared by the sequences. An “unrelated” or “non-homologous” sequence shares less than 40% identity, or alternatively less than 25% identity, with one of the sequences of the present invention.

### Cells

[0732] In some embodiments of the compositions and methods of the disclosure, a cell of the disclosure is a prokaryotic cell.

[0733] In some embodiments of the compositions and methods of the disclosure, a cell of the disclosure is a eukaryotic cell. In some embodiments, the cell is a mammalian cell. In some embodiments, the cell is a bovine, murine, feline, equine, porcine, canine, simian, or human cell. In some embodiments, the cell is a non-human mammalian cell such as a non-human primate cell.

[0734] In some embodiments, a cell of the disclosure is a somatic cell. In some embodiments, a cell of the disclosure is a germline cell. In some embodiments, a germline cell of the disclosure is not a human cell.

[0735] In some embodiments of the compositions and methods of the disclosure, a cell of the disclosure is a stem cell. In some embodiments, a cell of the disclosure is an embryonic stem cell. In some embodiments, an embryonic stem cell of the disclosure is not a human cell. In some embodiments, a cell of the disclosure is a multipotent stem cell or a pluripotent stem cell. In some embodiments, a cell of the disclosure is an adult stem cell. In some embodiments, a cell of the disclosure is an induced pluripotent stem cell (iPSC). In some embodiments, a cell of the disclosure is a hematopoietic stem cell (HSC).

[0736] In some embodiments of the compositions and methods of the disclosure, a somatic cell of the disclosure is a neuronal cell. In one embodiment, a cell or cells of a patient treated with compositions disclosed herein include, without limitation, central nervous system (neurons), peripheral nervous system (neurons), peripheral motor neurons, and/or sensory neurons. In one embodiment, a neuronal cell is a glial cell.

[0737] In some embodiments of the compositions and methods of the disclosure, a somatic cell of the disclosure is a fibroblast or an epithelial cell. In some embodiments, an epithelial cell of the disclosure forms a squamous cell epithelium, a cuboidal cell epithelium, a columnar cell epithelium, a stratified cell epithelium, a pseudostratified columnar cell epithelium or a transitional cell epithelium. In some embodiments, an epithelial cell of the disclosure forms a gland including, but not limited to, a pineal gland, a thymus gland, a pituitary gland, a thyroid gland, an adrenal gland, an apocrine gland, a holocrine gland, a merocrine gland, a serous gland, a mucous gland and a sebaceous gland. In some embodiments, an epithelial cell of the disclosure contacts an outer surface of an organ including, but not limited to, a lung, a spleen, a stomach, a pancreas, a bladder, an intestine, a kidney, a gallbladder, a liver, a larynx or a pharynx. In some embodiments, an epithelial cell of the disclosure contacts an outer surface of a blood vessel or a vein.

[0738] In some embodiments of the compositions and methods of the disclosure, a somatic cell of the disclosure is a primary cell.

[0739] In some embodiments of the compositions and methods of the disclosure, a somatic cell of the disclosure is a cultured cell.

[0740] In some embodiments of the compositions and methods of the disclosure, a somatic cell of the disclosure is in vivo, in vitro, ex vivo or in situ.

[0741] In some embodiments of the compositions and methods of the disclosure, a somatic cell of the disclosure is autologous or allogeneic.

[0742] Methods of Use

[0743] The disclosure provides a method of modifying level of expression of an RNA molecule of the disclosure or a protein encoded by the RNA molecule comprising contacting the composition of the disclosure and the RNA molecule under conditions suitable for binding of one or more of the guide RNA or the RNA-binding protein or RNA-binding fusion protein (or a portion thereof) to the RNA molecule.

[0744] The disclosure provides a method of modifying an activity of a protein encoded by an RNA molecule comprising contacting the composition of the disclosure and the RNA molecule under conditions suitable for binding of one or more of the guide RNA or the RNA-binding protein or the fusion protein (or a portion thereof) to the RNA molecule.

[0745] The disclosure provides a method of modifying level of expression of an RNA molecule of the disclosure or a protein encoded by the RNA molecule comprising contacting the composition of the disclosure and a cell comprising the RNA molecule under conditions suitable for binding of one or more of the guide RNA or the RNA-binding protein or fusion protein (or a portion thereof) to the RNA molecule. In some embodiments, the cell is in vivo, in vitro, ex vivo or in situ. In some embodiments, the composition of the disclosure comprises a vector comprising a guide RNA of the disclosure and an RNA-binding protein or fusion protein of the disclosure. In some embodiments, the vector is an AAV.

[0746] The disclosure provides a method of modifying an activity of a protein encoded by an RNA molecule comprising contacting the composition of the disclosure and a cell comprising the RNA molecule under conditions suitable for binding of one or more of the guide RNA or the RNA-binding protein or fusion protein (or a portion thereof) to the RNA molecule.

[0747] The disclosure provides a method of modifying the level of expression of an RNA molecule of the disclosure or a protein encoded by the RNA molecule comprising contacting the composition of the disclosure and the RNA molecule under conditions suitable for RNA nuclease activity wherein the RNA-binding protein or fusion protein induces a break in the RNA molecule.

[0748] The disclosure provides a method of modifying an activity of a protein encoded by an RNA molecule comprising contacting the composition of the disclosure and the RNA molecule under conditions suitable for RNA nuclease activity wherein the RNA-binding protein or fusion protein induces a break in the RNA molecule.

[0749] The disclosure provides a method of modifying a level of expression of an RNA molecule of the disclosure or a protein encoded by the RNA molecule comprising contacting the composition of the disclosure and a cell comprising the RNA molecule under conditions suitable for RNA nuclease activity wherein the RNA-binding protein or fusion protein induces a break in the RNA molecule. In some embodiments, the cell is in vivo, in vitro, ex vivo or in situ. In some embodiments, the composition comprises a vector comprising composition comprising a guide RNA of the disclosure and an RNA-binding fusion protein of the disclosure. In some embodiments, the vector is an AAV.

[0750] The disclosure provides a method of modifying an activity of a protein encoded by an RNA molecule comprising contacting the composition and a cell comprising the RNA molecule under conditions suitable for RNA nuclease activity wherein the RNA-binding protein or fusion protein induces a break in the RNA molecule. In some embodiments, the cell is in vivo, in vitro, ex vivo or in situ. In some embodiments, the composition comprises a vector comprising composition comprising a guide RNA or a single guide RNA of the disclosure and a nucleic acid sequence encoding an RNA-binding protein or fusion protein of the disclosure. In some embodiments, the vector is an AAV.

[0751] The disclosure provides a method of treating a disease or disorder comprising administering to a subject a therapeutically effective amount of a composition of the disclosure. In one embodiment, the disclosure provides a method of treating CAG repeat diseases. In another embodiment, the CAG repeat disorder is HD or SCA1. In another embodiment, the CAG repeat disorder is selected from the group consisting of HD, SCA1, SCA2, SCA3, SCA6, SCA7, SCA12, SCA17, Spinal and Bulbar Muscular Atrophy, and Denatorubral-Pallidoluysian Atrophy.

[0752] The disclosure provides a method of treating a CAG repeat diseases such as HD and SCA1 in a patient in need of such treatment comprising administering to the patient a therapeutically effective amount of a composition of the disclosure, wherein the composition comprises a vector comprising a guide RNA of the disclosure and a nucleic acid sequence encoding an RNA-binding protein or an RNA-binding protein fusion protein of the disclosure, wherein the composition modifies, reduces, destroys, knocks down or ablates a level of expression of a toxic CAG repeat RNA (compared to the level of expression of a toxic CAG repeat RNA treated with a non-targeting (NT) control or compared to no treatment). In one embodiment, the level of reduction of the target toxic CAG repeat RNA or toxic repeats encoded by the target RNA is compared to the level of reduction of the target RNA or toxic repeats encoded by the target RNA when treated with a non RNase Cas-based system (e.g., such as RCas9). In another embodiment, the level of reduction is 1-fold or greater. In another embodiment, the level of reduction is 2-fold, 3-fold, 4-fold, 5-fold, 6-fold, 7-fold, 8-fold, 9-fold or 10-fold. In another embodiment, the level of reduction is 10-fold or greater. In another embodiment, the level of reduction is between 10-fold and 20-fold. In another embodiment, the level of reduction is 11-fold, 12-fold, 13-fold, 14-fold, 15-fold, 16-fold, 17-fold, 18-fold, 19-fold, or 20-fold. In another embodiment, the gene therapy compositions disclosed herein when administered to a patient lead to 20%-100% destruction of the toxic CAG repeat RNA. In one embodiment, the % elimination of the toxic CAG repeat RNA is any of 20-99%, 25%-99%, 50%-99%, 80%-99%, 90%-99%, 95%-99%. In one embodiment, the % elimination is 90%, 91%, 92%, 93%, 94%, 95%, 96%, 97%, 98%, or 99%. In another embodiment, % elimination is complete elimination or 100% elimination of the toxic CAG repeat RNA.

[0753] In some embodiments, CAG-repeat RNA targeting compositions of the disclosure alter expression of proteins translated from CAG-repeat containing RNA (such as mRNA). In some aspects, the protein expression is reduced or eliminated. In some aspects, a CAG repeat comprising protein is mutated HTT (mHTT). In some aspects, a CAG repeat comprising protein is mutated ataxin-1 (mATXN1).

[0754] In some embodiments of the compositions and methods of the disclosure, a disease or disorder of the patient to be treated includes, without limitation, a disease or disorder related to CAG microsatellite repeat expansion expression. In some embodiments, the disease or disorder is related to CAG microsatellite repeat expansion in the HTT gene (HD) or ATXN1 gene (SCA1). In some embodiments of the compositions and methods of the disclosure, a disease or disorder of the disclosure is HD or SCA1.

[0755] In some embodiments of the methods of the disclosure, a subject of the disclosure has been diagnosed with a CAG repeat disorder. In some embodiments of the methods of the disclosure, a subject of the disclosure has been diagnosed with a CAG repeat disorder such as HD or SCA1. In some embodiments, the subject of the disclosure presents at least one sign or symptom of a CAG repeat disorder. In some embodiments, the subject of the disclosure presents at least one sign or symptom of HD. In some embodiments, the subject of the disclosure presents at least one sign or symptom of SCA1. At least one HD sign or HD symptom includes, without limitation, depression, poor coordination (with walking, speaking, swallowing), chorea, cognitive impairment (learning, lack of decisiveness, reasoning, decline in thinking abilities), and/or seizures. At least one SCA1 sign or SCA1 symptom includes, without limitation, coordination and balance issues (ataxia), speech and swallowing difficulties, muscle stiffness (spasticity), weakness in the muscles that control eye movements (nystagmus), cognitive impairment (with processing, learning, memory), sensory neuropathy, dystonia, atrophy, fasciculations, tremors, and/or chorea. In one embodiment, at least one sign or symptom of the CAG repeat disease such as HD or SCA1 is ameliorated by treatment with the compositions disclosed herein. In some embodiments, the subject has a biomarker predictive of a risk of developing a CAG repeat disease such as HD or SCA1. In some embodiments, the biomarker is a genetic mutation.

[0756] In some embodiments of the methods of the disclosure, a subject of the disclosure is female. In some embodiments of the methods of the disclosure, a subject of the disclosure is male. In some embodiments, a subject of the disclosure has two XX or XY chromosomes. In some embodiments, a subject of the disclosure has two XX or XY chromosomes and a third chromosome, either an X or a Y.

[0757] In some embodiments of the methods of the disclosure, a subject of the disclosure is a neonate, an infant, a child, an adult, a senior adult, or an elderly adult. In some embodiments of the methods of the disclosure, a subject of the disclosure is at least 1, 2, 3, 4, 5, 6, 7, 8, 9, 10, 11, 12, 13, 14, 15, 16, 17, 18, 19, 20, 21, 22, 23, 24, 25, 26, 27, 28, 29, 30 or 31 days old. In some embodiments of the methods of the disclosure, a subject of the disclosure is at least 1, 2, 3, 4, 5, 6, 7, 8, 9, 10, 11 or 12 months old. In some embodiments of the methods of the disclosure, a subject of the disclosure is at least 1, 2, 3, 4, 5, 6, 7, 8, 9, 10, 15, 20, 25, 30, 35, 40, 45, 50, 55, 60, 65, 70, 75, 80, 85, 90, 95, 100 or any number of years or partial years in between of age.

[0758] In some embodiments of the methods of the disclosure, a subject of the disclosure is a mammal. In some embodiments, a subject of the disclosure is a non-human mammal.

[0759] In some embodiments of the methods of the disclosure, a subject of the disclosure is a human.

[0760] In some embodiments of the methods of the disclosure, a therapeutically effective amount comprises a single dose of a composition of the disclosure. In some embodiments, a therapeutically effective amount comprises a therapeutically effective amount comprises at least one dose of a composition of the disclosure. In some embodiments, a therapeutically effective amount comprises a therapeutically effective amount comprises one or more dose(s) of a composition of the disclosure.

[0761] In some embodiments of the methods of the disclosure, a therapeutically effective amount eliminates a sign or symptom of the disease or disorder. In some embodiments, a therapeutically effective amount reduces a severity of a sign or symptom of the disease or disorder.

[0762] In some embodiments of the methods of the disclosure, a therapeutically effective amount eliminates the disease or disorder.

[0763] In some embodiments of the methods of the disclosure, a therapeutically effective amount prevents an onset of a disease or disorder. In some embodiments, a therapeutically effective amount delays the onset of a disease or disorder. In some embodiments, a therapeutically effective amount reduces the severity of a sign or symptom of the disease or disorder. In some embodiments, a therapeutically effective amount improves a prognosis for the subject.

[0764] In some embodiments of the methods of the disclosure, a composition of the disclosure is administered to the subject via intracerebral administration. In some embodiments, the composition of the disclosure is administered to the subject by an intrastriatal route. In some embodiments, the composition of the disclosure is administered to the subject by a stereotaxic injection or an infusion. In some embodiments, the composition is administered to the brain. In some embodiments of the methods of the disclosure, a composition of the disclosure is administered to the subject locally.

[0765] In some embodiments, the compositions disclosed herein are formulated as pharmaceutical compositions. Briefly, pharmaceutical compositions for use as disclosed herein may comprise a protein(s) or a polynucleotide encoding the protein(s), optionally comprised in an AAV, which is optionally also immune orthogonal, in combination with one or more pharmaceutically or physiologically acceptable carriers, diluents or excipients. Such compositions may comprise buffers such as neutral buffered saline, phosphate buffered saline and the like; carbohydrates such as glucose, mannose, sucrose or dextrans, mannitol; proteins; polypeptides or amino acids such as glycine; antioxidants; chelating agents such as EDTA or glutathione; adjuvants (e.g., aluminum hydroxide); and preservatives. Compositions of the disclosure may be formulated for routes of administration, such as e.g., oral, enteral, topical, transdermal, intranasal, and/or inhalation; and for routes of administration via injection or infusion such as, e.g., intravenous, intramuscular, subpial, intrathecal, intraparenchymal, intrathecal, intrastriatal, subcutaneous, intradermal, intraperitoneal, intratumoral, intravenous, intraocular, and/or parenteral administration. In certain embodiments, the compositions of the present disclosure are formulated for intracerebral or intrastriatal administration.

### EXAMPLES

### Example 1: Cas13d and PUF Systems Destroy Toxic CAG Repeats

### Methods

[0766] Transfection, RNA extraction, FISH, qRT-PCR Analysis

[0767] Cleavage efficiency of CAG repeats in vitro was detected by exogenously expressing 80 CAG repeats driven by the CMV promoter and assessing knockdown of CAG-repeat containing RNA using an in house designed qRT-PCR assay and or FISH (DAPI staining and fluorescent CAG probe). Immunofluorescence using anti-polyQ antibody indicated elimination of toxic Poly-Q protein aggregates. Cas and CAG spacer systems or PUF protein linked to the endonuclease E17 proteins targeting CAG repeats were used to evaluate cleavage of CAG-repeat containing RNA. For all experiments 1 ug of the effector or effector and guide were used to transfect cells using Lipofectamine 3000 (Thermo) into CosM6 cells (according to the manufacturer's protocol) along with the 50 ng of the pCMV-CAG80 reporter plasmid. Cells were subjected to qRT-PCR or FISH for analysis. (A myc-tagged version of PUF-CAG-E17 was used and protein expression was detected by IF (immunofluorescence) using an anti-myc antibody.) Transfected cells were harvested 48 h post-transfection, and for qRT-PCR RNA was extracted using the Qiagen RNeasy kit, and qRT-PCR for the CAG repeat was performed using the Quantabio 1-step qRT-PCR kit, Biorad qPCR machine and the following primer sets: CAG Forward: CAAAGACCACGACGGAGATT (SEQ ID NO: 584) Reverse: TCAGCTTCTGCTCCAGATCC (SEQ ID NO: 585). CAG expression was normalized to GAPDH reference gene and calculated relative to no targeting control conditions.

[0768] In some aspects, a truncated CAG (tCAG) promoter (SEQ ID NO: 389) was used. In some aspects, a short EF1-alpha (EFS) promoter (SEQ ID NO: 520) was used.

[0769] For Cas13d systems, the spacers used in CAG targeting guides are as follows:

| Spacer | Spacer Sequences |
|---|---|
| CAG guide 1 | tgctgctgctgctgctgctgctgctg |
| | (SEQ ID NO: 457) |
| CAG guide 2 | gctgctgctgctgctgctgctgctgc |
| | (SEQ ID NO: 458) |
| CAG guide 3 | ctgctgctgctgctgctgctgctgct |
| | (SEQ ID NO: 459) |

[0770] For PUF targeting CAG, the construct encoding the following 8PUF(CAG) was used:

| Protein | | Target | Amino Acid |
|---|---|---|---|
| Type | Elements | Sequence | Sequence of PUF |
| 8PUF | Linker between | CAGCAGCA | GRSRLLEDFRNNRYPNLQL |
| Frame 1 | PUF and E17 | | REIAGHIMEFSQDQHGSRF |
| | endonuclease | | IQLKLERATPAERQLVFNE |
| | (VDTANGS); | | ILQAAYQLMVDVFGSYVIR |
| | C-terminal | | KFFEFGSLEQKLALAERIR |
| | E17; Some | | GHVLSLALQMYGSRVIEKA |
| | extra amino | | LEFIPSDQQNEMVRELDGH |
| | acids before | | VLKCVKDQNGCYVVQKCIE |
| | R1′ and | | CVQPQSLQFIIDAFKGQVF |
| | between R8′ | | ALSTHPYGSRVIRRILEHC |
| | and linker. | | LPDQTLPILEELHQHTEQL |
| | R4 amino acid | | VQDQYGSYVIEHVLEHGRP |
| | 13 Y instead | | EDKSKIVAEIRGNVLVLSQ |
| | of H | | HKFACNVVQKCVTHASRTE |
| | | | RAVLIDEVCTMNDGPHSAL |
| | | | YTMMKDQYASYVVRKMIDV |
| | | | AEPGQRKIVMHKIRPHIAT |
| | | | LRKYTYGKHILAKLEKYYM |
| | | | KNGVDLG |
| | | | (SEQ ID NO: 480) |
| 8PUF | N-terminal | GCAGCAGC | GRSRLLEDFRNNRYPNLQL |
| Frame 2 | PUF and E17 | | REIAGHIMEFSQDQHGSRF |
| | endonuclease | | IRLKLERATPAERQLVFNE |
| | (VDTANGS); | | ILQAAYQLMVDVFGSYVIE |
| | C-terminal E17 | | KFFEFGSLEQKLALAERIR |
| | | | GHVLSLALQMYGCRVIQKA |
| | | | LEFIPSDQQNEMVRELDGH |
| | | | VLKCVKDQNGSYVVRKCIE |
| | | | CVQPQSLQFIIDAFKGQVF |
| | | | ALSTHPYGSRVIERILEHC |
| | | | LPDQTLPILEELHQHTEQL |
| | | | VQDQYGCYVIQHVLEHGRP |
| | | | EDKSKIVAEIRGNVLVLSQ |
| | | | HKFASYVVRKCVTHASRTE |
| | | | RAVLIDEVCTMNDGPHSAL |
| | | | YTMMKDQYASYVVEKMIDV |
| | | | AEPGQRKIVMHKIRPHIAT |
| | | | LRKYTYGKHILAKLEKYYM |
| | | | KNGVDLG |
| | | | (SEQ ID NO: 549) |

### Example 2: Targeting Expanded CAG Repeats at the RNA Level for the Treatment of CAG Repeat Disease Huntington's Disease by PUF-E17

[0771] A transgene encoding CAG-targeting PUF linked to the endonuclease E17 (derived from human ZC3HT12A gene) is delivered via either an intrastriatal route via viral or nonviral approaches. The PUF targeting CAG construct for AAV-based delivery in the below art-recognized animal model for Huntington's Disease, R6/2 mouse model, is:

| Protein | | Target | Amino Acid |
|---|---|---|---|
| Type | Elements | Sequence | Sequence of PUF |
| 8PUF | Linker between | CAGCAGCA | GRSRLLEDFRNNRYPNLQL |
| Frame 1 | PUF and E17 | | REIAGHIMEFSQDQHGSRF |
| | endonuclease | | IQLKLERATPAERQLVFNE |
| | (VDTANGS); | | ILQAAYQLMVDVFGSYVIR |
| | C-terminal | | KFFEFGSLEQKLALAERIR |
| | E17; Some | | GHVLSLALQMYGSRVIEKA |
| | extra amino | | LEFIPSDQQNEMVRELDGH |
| | acids before | | VLKCVKDQNGCYVVQKCIE |
| | R1′ and | | CVQPQSLQFIIDAFKGQVF |
| | between R8′ | | ALSTHPYGSRVIRRILEHC |
| | and linker. | | LPDQTLPILEELHQHTEQL |
| | R4 amino acid | | VQDQYGSYVIEHVLEHGRP |
| | 13 Y instead | | EDKSKIVAEIRGNVLVLSQ |
| | of H | | HKFACNVVQKCVTHASRTE |
| | | | RAVLIDEVCTMNDGPHSAL |
| | | | YTMMKDQYASYVVRKMIDV |
| | | | AEPGQRKIVMHKIRPHIAT |
| | | | LRKYTYGKHILAKLEKYYM |
| | | | KNGVDLG |
| | | | (SEQ ID NO: 480) |
| 8PUF | N-terminal | GCAGCAGC | GRSRLLEDFRNNRYPNLQL |
| Frame 2 | PUF and E17 | | REIAGHIMEFSQDQHGSRF |
| | endonuclease | | IRLKLERATPAERQLVFNE |
| | (VDTANGS); | | ILQAAYQLMVDVFGSYVIE |
| | C-terminal E17 | | KFFEFGSLEQKLALAERIR |
| | | | GHVLSLALQMYGCRVIQKA |
| | | | LEFIPSDQQNEMVRELDGH |
| | | | VLKCVKDQNGSYVVRKCIE |
| | | | CVQPQSLQFIIDAFKGQVF |
| | | | ALSTHPYGSRVIERILEHC |
| | | | LPDQTLPILEELHQHTEQL |
| | | | VQDQYGCYVIQHVLEHGRP |
| | | | EDKSKIVAEIRGNVLVLSQ |
| | | | HKFASYVVRKCVTHASRTE |
| | | | RAVLIDEVCTMNDGPHSAL |
| | | | YTMMKDQYASYVVEKMIDV |
| | | | AEPGQRKIVMHKIRPHIAT |
| | | | LRKYTYGKHILAKLEKYYM |
| | | | KNGVDLG |
| | | | (SEQ ID NO: 549) |

[0772] In order to target expanded CAG repeats associated with HD, AAV vector with DNA encoding CAG-targeting PUF-E17 is delivered to via bilateral stereotaxic injection. PUF-E17 expression is driven by a promoter (FIG. 3A). In some aspects, a truncated CAG (tCAG) promoter (SEQ ID NO: 389) was used.

### Example 3: Assessment of CAG-Vectors in HD Mouse Models

[0773] CAG-targeting PUF AAVrh10-1684 and AAVrh10-1589 (comprising the features in FIG. 6B3) were tested in a R6/2 mouse model. Body weight of the mice was evaluated in the weeks following injection.

[0774] FIG. 6A is a graph depicting percent change in body weight in mice treated with either an AAVrh10-1684 vector or AAVrh10-1589 vector at a mid-dose relative to a sham control.

[0775] FIG. 6B is a table depicting the vector composition of the AAVrh10-1684 vector and the AAVrh10-1589 vector. AAVrh10-1684 comprises an EFS/UBB promoter controlling expression of a CAG-targeted PUF protein lacking an endonuclease fusion. AAVrh1-1589 comprises an EFS/UBB promoter controlling expression of an E17 endonuclease lacking a CAG-targeting RNA binding protein.

### Example 4: Optimization of CAG-Repeat Targeting RNA Delivery in Non-Human Primates

[0776] AAVrh10-1383 (LBIO-210) was evaluated to assess tolerability in different species. In a non-human primate delivery of LBIO-210 was optimized according to the following: reduced volume and flow rate; altered cannula type; identified ideal cannula placement. 08431 FIG. 7 is a series of images depicting gadoteridol expression representative of delivery of AAVrh10-1383 (LBIO-210) in non-human primates before (FIG. 7A) and after (FIG. 7i) delivery optimization.

| Surgery | Dose | Surgery | | |
|---|---|---|---|---|
| # | Level | Comments | In-life observations | Interpretation |
| 1 | High | Overfilling | Mild left leg tremor | Procedure- |
| | | of putamen | developed 5-6 days | related |
| | | likely; some | post-injection | |
| | | vector efflux | | |
| 2 | Low | Large amount of | No observations | LBIO-210 |
| | | vector efflux; Air | | well-tolerated |
| | | bubble observed | | |
| | | at injection site | | |
| 3 | High | Good targeting | No observations | LBIO-210 well- |
| | | | | tolerated so far |
| 4 | Low | Good targeting | Mild bilateral tremor | Waiting for |
| | | | developed 8 days | neuroradiologist |
| | | | post-injection | review of MRI |
| 5 | High | Good targeting | No observations | LBIO-210 well- |
| 6 | High | Good targeting | No observations | tolerated so far |
| 7 | High | Likely cortical | Left arm and left | Procedure- |
| | | damage during | leg weakness | related |
| | | injection due to | developed 3 | |
| | | cannula | days post-injection | |
| | | deflection | | |

### Example 5: CAG-Targeting RCas9 System Reduces Mutant HTT Protein with No Change in Mutant HTT RNA Levels

[0777] A CAG-repeat targeting RCas9 system was evaluated to assess the impact of HTT protein expression by targeting CAG-repeat RNA in mice.

[0778] FIG. 9A is a table depicting rCas9 constructs used in FIGS. 9B and 9C. Study HD08 group 1 is divided into two halves (hemispheres): hemi 1 utilized AAV9-rCas9-PIN and a non-targeting (NT) guide RNA (AAV9-1475) while the other hemi (hemi 2) utilized AAV9-rCas9-PIN with a CAG repeat-targeting guide RNA (AAV9-1347). Study HD08b was divided into group 2 (AAV9-RCas9-PIN+CAG guide (AAV9-1347) and group 3 AAV9-RCas9-PIN+NT guide (AAV9-1475).

[0779] FIG. 9B is a series of graphs depicting relative mutant HTT (mHTT) RNA levels and protein (soluble mHTT) levels in mice following treatment with RCas9+NT or RCas9+CAG (Study HD08). *mHTT RNA levels normalized to Atp5b and Eif4a2.

[0780] FIG. 9C is a series of graphs depicting relative mutant HTT (mHTT) RNA levels in mice following treatment with RCas9+NT or RCas9+CAG and relative Darpp32 levels and relative Pdel0a levels*. (Study HD08b). *Normalized to Atp5b and Eif4a2.

[0781] No body weight loss was observed following treatment. Further, no change in mutant HTT RNA levels suggests that PIN is a weak endonuclease (FIG. 9B). However, a large reduction in soluble mutant HTT protein [3 out of 4 animals showed meaningful reductions (44-74% decrease)].

### Example 6: Establishing zQ175 P1 Cortical Neuron Cultures as an Efficacy and Safety Model

[0782] P1 cortical neurons were derived from zQ175 knock-in (zQ175 KI) allele mice has the mouse HTT exon 1 replaced with human HTT exon 1 sequences with an about 190 CAG repeat tract. These B6J.zQ175 KI mice (Jax Lab, Stock No. 027410) are useful for studying Huntington's disease pathogenesis and for the assessment of potential therapeutic interventions. Isolation and culture of P1 neurons from zQ175 mice facilitates higher-throughput assessments of gene therapy constructs in a relevant neuronal disease model.

[0783] Overall Method

[0784] Isolate P1 neurons from zQ175 mice using papain dissociation method and mature cultures for 10 days (adding AraC on day 3. Transduce cultures with viral constructs (i.e. CAG-targeting proteins of the disclosure) on day 10. Maintain cultures for 7 days post-transduction sampling supernatant and cell lysates for efficacy and safety assessments at appropriate timepoints.

[0785] Methods

[0786] Results

[0787] Established zQ175 P1 cortical neuron cultures contain both neurons and astrocytes as measured by fluorescent microscopy and immunohistochemical staining (FIG. 10A).

[0788] Next, cultured cells were assessed for the ability to transduce AAVrh10 vectors. AN AAVrh10 vector encoding green fluorescent protein (GFP) is readily transduced and GFP is readily expressed (FIG. 10B).

[0789] Mutant HTT (mHTT) levels were assessed following treatment of the cell culture with CAG-targeting AAV constructs of the disclosure and mHTT levels were compared to untreated control (UTC) (FIG. 10C). Vector A01380 (synapsin-PUF(CAG)-E17) comprising the neuron-specific promoter synapsin delivered at an MOI of 1E4, 1E5, and 1E6. Dose-dependent reduction in mHTT levels were observed with increasing dosage of A01380 vector (FIG. 10C).

### Example 7: HD Patient-Derived Cells Allow Evaluation of Allele Preference and Efficacy Across a Range of CAG Repeat Lengths

[0790] Patient-derived cells allow evaluation of allele preference and efficacy across a range of varying CAG repeat lengths. FIG. 11A is a series of images of Huntington Disease patient-derived fibroblasts. FIG. 11B is an image of a gel depicting both wild-type and mutated HTT. These fibroblasts are a useful system for testing CAG-targeting compositions of the disclosure.

### Example 8: Assessment of Cas13d CAG-Targeting Constructs in zQ175 P1 Neurons

[0791] P1 cortical neurons were derived from zQ175 knock-in (zQ175 KI) allele mice has the mouse HTT exon 1 replaced with human HTT exon 1 sequences with an about 190 CAG repeat tract. These B6J.zQ175 KI mice (Jax Lab, Stock No. 027410) are useful for studying Huntington's disease pathogenesis and for the assessment of potential therapeutic interventions. Isolation and culture of P1 neurons from zQ175 mice facilitates higher-throughput assessments of gene therapy constructs in a relevant neuronal disease model.

### Overall Method

[0792] Isolate P1 neurons from zQ175 mice using papain dissociation method and mature cultures for 10 days (adding AraC on day 3. Transduce cultures with viral constructs (i.e., CAG-targeting proteins of the disclosure) on day 10. Maintain cultures for 7 days post-transduction sampling supernatant and cell lysates for efficacy and safety assessments at appropriate timepoints.

### Methods

### In-Life:

[0793] Day 1: Cells isolated, plated, and maintained in 24-well plates as described in previous slide

[0794] Day 3: Ara-C administration begins at final concentration of 1 uM

[0795] Day 10: Perform AAV transductions at 1E5 and 1E6 MOI. Sample baseline media and cell lysates (if possible, samples permitting) prior to administering transductions

[0796] Day 13: Harvest media and cell lysates for 3 day post-transduction timepoint (if possible, samples permitting)

[0797] Day 17: Harvest media and cell lysates for 7 day post-transduction timepoint

### Endpoint Assays:

[0798] RNA prepared and qRT-PCR ran to quantitate expression levels of constructs and target transcripts.

[0799] Protein prepared for assessment of mHTT and WT HT protein levels via Meso Scale Discovery (MSD).

[0800] LDH-Glo cytotoxicity assay.

### Analysis:

[0801] Target transcript expression normalized to reference gene panel (GAPDH, EIF4A2, and ATP5B)

[0802] HKG-normalized data normalized to standard curve to account for primer-to-primer variation in efficiency.

[0803] Cytotoxicity data background subtracted and plotted as fold change from untreated control.

### Materials

[0804] AAVs: Details listed in Table U.
[0805] RNA Prep: Rneasy 96 (Qiagen, 74182)
[0806] qRT-PCR: TaqPath 1-Step Multiplex Master Mix (ThermoFisher, A28522)
[0807] Primers: HTT-FAM, mGAPDH-HEX, mEIF4A2-Cy5, and mATP5B-HEX
[0808] Cell Health: Cytotoxicity (LDH-Glo, J2380, Promega)

TABLE U
Vectors used in study and study design

| Test Articles | Cell/Animals | Dose (MOI) | Timepoints |
|---|---|---|---|
| dCas13d dSeq212-CAG- | 1. zQ175 | 1E5 and 1E6 | D7 post- |
| AAVrh10.A01553 | P1 | | transduction |
| Cas13d Seq212-CAG | Neurons | | |
| Guide | | | |
| Only-AAVrh10.A01477 | | | |
| dCas13d dSeq212-CAG- | | | |
| AAVrh10.A01479 | | | |
| PUF-CAG - | | | |
| AAVrh10.A01383 | | | |
| shRNA-CAG-AAVrh9 | | | |

[0809] Mutant HTT (mHTT) expression was assessed in P1 neuronal cultures derived from untreated WT and HET pups as measured by qRT-PCR (FIG. 12). HET-specific expression of mHTT was demonstrated using raw Cts, whereas in 40 of 46 wildtype samples no mHTT was detected.

[0810] CAG-repeat targeting constructs of the disclosure were assessed for their ability to alter mHTT expression in P1 neuronal cultures. The P1 neuronal cultures were transduced with vectors of the disclosure including CAG-targeting PUF proteins and CAG-targeting dCas13d (Seq212) proteins for 7 days. Vectors used include those in table U Doses included 1E5 and 1E6 MOI. mHTT and WT HT expression levels were measured by qRT-PCR

[0811] mHTT-specific knockdown (KD) was observed with CAG-targeting constructs A01383, A01479, and A01553 as assessed by increased delta Ct where increased knockdown is indicated by higher delta Ct (FIG. 13A). Wildtype HTT levels were largely unaffected (FIG. 13B).

[0812] P1 neurons derived from heterozygous zQ175 mouse pups were transduced with CAG-targeting PUF and Cas1d Seq212 constructs at 1E5 and 1E6 MOI for 7 days. mHTT protein levels were measured by Meso Scale Discovery Immunoassay (MSD) (FIG. 14A and FIG. 14B). P1 neurons were prepared from zQ175 heterozygous pups using a papain dissociation method. After 10 days of maturation, neurons transduced with CAG-targeting PUF and Cas13d Seq212 constructs at 1E5 and 1E6 MOI for 7 days. Cells lysed and mHTT protein levels measured using Meso Scale Discovery Immunoassay (MSD). mHTT protein knockdown was observed with CAG-targeting constructs A01383, A01479, and A01922.

[0813] Expression of CAG-repeat targeting cas13d constructs were assessed to measure both casl3d expression and guide RNA expression in mHTT protein KD observed with CAG-targeting constructs A01383, A01479, and A01922

[0814] dCas13d (Seq212) and guide RNA expression levels were measured by qRT-PCR.

[0815] dCas13d-expressing constructs A01479 and A01553 exhibit similar levels of dCas13d expression (Higher expression=Lower delta Ct) (FIG. 15A).

[0816] Comparable dose responsive guide RNA levels was observed with dCas13d-expressing constructs A01479 and A0155 (FIG. 15B). Low guide RNA levels with “guide only” (No Seq212) construct A01477 was observed.

[0817] Neuronal health signatures evaluated in P1 neurons transduced with CAG-targeting PUF A01383 at 1E5 MOI for 7 days. Neuronal and microglial activation marker, AIF1, PDE10A, PPPIR1B, and RBFOX3 expression levels measured by qRT-PCR. Neuronal and microglial activation marker expression levels measured by qRT-PCR (FIG. 16A and FIG. 16B). CAG-repeat targeting PUF construct A01383-specific neuronal health signature observed (compared to dCas13d constructs). Lower expression=increased delta Ct. Stimulated expression=lowered delta Ct. Further, cytotoxicity was assessed for each vector construct. P1 neurons transduced with CAG-targeting constructs at 1E5 MOI for 7 days (FIG. 17). Cytotoxicity was assessed using LDH-Glo (Promega). A01383-enriched cytotoxicity observed (compared to dCas13d Seq212 constructs). A neuronal health gene signature was developed that can be predictive of in vivo safety.

### INCORPORATION BY REFERENCE

[0818] Every document cited herein, including any cross referenced or related patent or application is hereby incorporated herein by reference in its entirety unless expressly excluded or otherwise limited. The citation of any document is not an admission that it is prior art with respect to any invention disclosed or embodiment herein or that it alone, or in any combination with any other reference or references, teaches, suggests or discloses any such invention. Further, to the extent that any meaning or definition of a term in this document conflicts with any meaning or definition of the same term in a document incorporated by reference, the meaning or definition assigned to that term in this document shall govern.

### OTHER EMBODIMENTS

[0819] While particular embodiments of the disclosure have been illustrated and described, various other changes and modifications can be made without departing from the spirit and scope of the disclosure. The scope of the appended claims includes all such changes and modifications that are within the scope of this disclosure.

What is claimed is:

1. A composition comprising a nucleic acid sequence encoding an RNA-binding polypeptide comprising a non-guided RNA binding polypeptide or a guided RNA-binding polypeptide capable of binding a toxic target CAG repeat RNA sequence.

2. The composition of claim 1, wherein the RNA-binding polypeptide is a fusion protein.

3. The composition of claim 2, wherein the fusion protein comprises the RNA binding polypeptide fused to an endonuclease capable of cleaving the toxic CAG repeat RNA sequence.

4. The composition of any one of the preceding claims, wherein the non-guided RNA binding polypeptide is a PUF or PUMBY protein.

5. The composition of any one of the preceding claims, wherein the guided RNA-binding polypeptide is a Cas13d protein.

6. The composition of any one of the preceding claims, wherein the cas13d protein is catalytically dead.

7. The composition of any one of the preceding claims, wherein the casl3d protein comprises an amino acid sequence set forth in any one of SEQ ID NOs 587 or 590-594.

8. The composition of any one of the preceding claims, wherein the endonuclease is a nuclease domain of a ZC3H12A zinc-finger endonuclease.

9. The composition of any one of the preceding claims, wherein the PUF RNA binding protein comprises an amino acid sequence set forth in any one of SEQ ID NOs 444-451, 461, 480-488, 549-557, or 656.

10. The composition of any one of the preceding claims, wherein the PUF RNA binding protein comprises an amino acid sequence set forth in SEQ ID NO: 549 or 480.

11. The composition of any one of the preceding claims, wherein the toxic target CAG RNA repeat sequence comprises any one of the nucleic acid sequences set forth in SEQ ID NOs 453-456 or 472-479.

12. The composition of any one of the preceding claims, wherein the toxic target CAG RNA repeat sequence comprises the nucleic acid sequence set forth in any one of SEQ ID NO: 453 or 472.

13. The composition of any one of the preceding claims, wherein the CAG-targeting PUF protein is encoded by a nucleic acid sequence as set forth in SEQ ID NO: 577, 581, 614, 619, 621, or 622.

14. The composition of any one of the preceding claims, wherein the PUF or PUMBY protein is a human PUF or PUMBY protein.

15. The composition of any one of the preceding claims, wherein the PUF or PUMBY protein is linked to the ZC3H12A endonuclease by a linker sequence.

16. The composition of any one of the preceding claims, wherein the linker comprises the amino acid sequence set forth in SEQ ID NO: 411.

17. The composition of any one of the preceding claims, wherein the fusion protein comprises one or more signal sequences selected from the group consisting of a nuclear localization sequence (NLS), and a nuclear export sequence (NES).

18. The composition of any one of the preceding claims, wherein the ZC3H12A zinc finger nuclease comprises the amino acid sequence set forth in SEQ ID NO: 358 or SEQ ID NO: 359.

19. The composition of any one of the preceding claims, wherein the fusion protein comprises the amino acid sequence set forth in any one of SEQ ID NO: 460.

20. The composition of any one of the preceding claims, wherein the fusion protein is encoded by a nucleic acid sequence comprising SEQ ID NO: 574-582.

21. The composition of any one of the preceding claims, wherein the nucleic acid molecule encoding the fusion protein comprises a promoter.

22. The composition of claim 14, wherein the promoter is a tCAG promoter, EFS/UBB promoter, or synapsin promoter.

23. A vector comprising the composition of any one of the preceding claims.

24. The vector of claim 23, wherein the vector is selected from the group consisting of: adeno-associated virus (AAV), retrovirus, lentivirus, adenovirus, nanoparticle, micelle, liposome, lipoplex, polymersome, polyplex, and dendrimer.

25. The vector of claim 23, which is an AAV vector.

26. An AAV vector of any one of the preceding claims, wherein the AAV vector comprises:
a first AAV ITR sequence;
a first promoter sequence;
a polynucleotide sequence encoding for at least one CAG-repeat RNA binding polypeptide; and
a second AAV ITR sequence.

27. The AAV vector of any one of the preceding claims, wherein the CAG-repeat RNA binding polypeptide comprises a PUF or PUMBY protein.

28. The AAV vector of any one of the preceding claims, wherein the polynucleotide sequence encoding the PUF or PUMBY sequence comprises a nucleic acid sequence set forth in SEQ ID NO: 577, 581, 614, 619, 621, or 622.

29. The AAV vector of any one of the preceding claims, wherein the CAG-repeat RNA binding polypeptide comprises a Cas13d protein.

30. The AAV vector of any one of the preceding claims, wherein the polynucleotide sequence encoding the Cas13d sequence comprises a nucleic acid sequence set forth in SEQ ID NO: 587 or 590-594.

31. The AAV vector of any one of the preceding claims, wherein the first promoter sequence comprises a nucleic acid sequence set forth in SEQ ID NO: 389, 627, or 613.

32. The AAV vector of any one of the preceding claims, wherein the first AAV ITR sequence comprises a nucleic acid sequence set forth in SEQ ID NO: 597 or 598.

33. The AAV vector of any one of the preceding claims, wherein the second AAV ITR sequence comprises a nucleic acid sequence set forth in SEQ ID NO: 597 or 598.

34. The AAV vector of any one of the preceding claims, wherein the vector further comprises a second promoter sequence.

35. The AAV vector of any one of the preceding claims, wherein the second promoter controls expression of a guide RNA (gRNA) wherein the gRNA comprises (i) a DR sequence and (ii) a spacer sequence.

36. The AAV vector of any one of the preceding claims, wherein the second promoter comprises a nucleic acid sequence set forth in SEQ ID NO: 519.

37. The AAV vector of any one of the preceding claims, wherein the vector further comprises a polyA sequence.

38. The AAV vector of any one of the preceding claims, wherein the vector comprises at least one linker sequence.

39. The AAV vector of any one of the preceding claims, wherein the vector comprises at least one nuclear localization sequence.

40. The AAV vector of any one of the preceding claims, wherein the vector is encoded be a nucleic set forth in any of one of SEQ ID NO: 588, 589, 624, or 625.

41. A pharmaceutical composition comprising:
a) the AAV viral vector of any one of claims 25-40; and
b) at least one pharmaceutically acceptable excipient and/or additive.

42. An AAV viral vector comprising:
a) an AAV vector of any one of the preceding claims; and
b) an AAV capsid protein.

43. The AAV viral vector of claim 42, wherein the AAV capsid protein is an AAV1 capsid protein, an AAV2 capsid protein, an AAV4 capsid protein, an AAV5 capsid protein, an AAV6 capsid protein, an AAV7 capsid protein, an AAV8 capsid protein, an AAV9 capsid protein, an AAV10 capsid protein, an AAV 11 capsid protein, an AAV12 capsid protein, an AAV13 capsid protein, an AAVPHP.B capsid protein, an AAVrh74 capsid protein or an AAVrh.10 capsid protein.

44. The AAV viral vector of claim 43, wherein the AAV capsid protein is an AAV9 or AAVrh10 capsid protein

45. A cell comprising the vector of any one of the preceding claims.

46. A method of treating a CAG repeat disease in a mammal comprising administering a composition or AAV vector according to any one of claims 1-45 to a toxic target CAG microsatellite repeat expansion (MRE) RNA sequence in tissues of the mammal whereby the level of expression of the toxic target RNA is reduced.

47. The method of claim 46, wherein the composition or AAV vector is administered to the subject intravenously, intrathecally, intracerebrally, intraventricularly, intranasally, intratracheally, intra-aurally, intra-ocularly, or peri-ocularly, orally, rectally, transmucosally, inhalationally, transdermally, parenterally, subcutaneously, intradermally, intramuscularly, intracisternally, intranervally, intrapleurally, topically, intralymphatically, intracisternally or intranerve.

48. The method of claim 46, wherein the composition or AAV vector is administered to the subject intravenously.

49. The method of claim 46, wherein the CAG repeat disorder is Huntington's Disease (HD) or Spinocerebellar Ataxia Type 1 (SCA1)

50. The method of claim 46, wherein the reduced level of expression of the toxic target RNA thereby ameliorates symptoms of HD or SCA1 in the mammal.

51. The method of claim 46, wherein the level of expression of the toxic target RNA is reduced compared to the reduction in the level of expression of untreated toxic target CAG RNA.

52. The method of claim 46, wherein the toxic CAG repeat is a CAG³⁶ or more.

53. The method of claim 46, wherein the toxic CAG repeat is a CAG⁸⁰ repeat.

54. The method of claim 46, wherein the level of reduction is between 1-fold and 20-fold.

The application's sequence listing, which the Patent Office published only in electronic form, follows.

SEQUENCE LISTING (656 sequences)

SEQ ID NO: 1 - protein, 954 aa, Artificial Sequence
  Eubacterium siraeum nCas1
MGKKIHARDLREQRKTDRTEKFADQNKKREAERAVPKKDAAVSVKSVSSVSSKKDNVTKSMAKAAGVKSVFAVGNTVYMTSFGRGNDAVLEQKIVDTSHEPLNIDDPAYQLNVVTMNGYSVTGHRGETVSAVTDNPLRRFNGRKKDEPEQSVPTDMLCLKPTLEKKFFGKEFDDNIHIQLIYNILDIEKILAVYSTNAIYALNNMSADENIENSDFFMKRTTDETFDDFEKKKESTNSREKADFDAFEKFIGNYRLAYFADAFYVNKKNPKGKAKNVLREDKELYSVLTLIGKLRHWCVHSEEGRAEFWLYKLDELKDDFKNVLDVVYNRPVEEINNRFIENNKVNIQILGSVYKNTDIAELVRSYYEFLITKKYKNMGFSIKKLRESMLEGKGYADKEYDSVRNKLYQMTDFILYTGYINEDSDRADDLVNTLRSSLKEDDKTTVYCKEADYLWKKYRESIREVADALDGDNIKKLSKSNIEIQEDKLRKCFISYADSVSEFTKLIYLLTRFLSGKEINDLVTTLINKFDNIRSFLEIMDELGLDRTFTAEYSFFEGSTKYLAELVELNSFVKSCSFDINAKRTMYRDALDILGIESDKTEEDIEKMIDNILQIDANGDKKLKKNNGLRNFIASNVIDSNRFKYLVRYGNPKKIRETAKCKPAVRFVLNEIPDAQIERYYEACCPKNTALCSANKRREKLADMIAEIKFENFSDAGNYQKANVTSRTSEAEIKRKNQAIIRLYLTVMYIMLKNLVNVNARYVIAFHCVERDTKLYAESGLEVGNIEKNKTNLTMAVMGVKLENGIIKTEFDKSFAENAANRYLRNARWYKLILDNLKKSERAVVNEFRNTVCHLNAIRNININIKEIKEVENYFALYHYLIQKHLENRFADKKVERDTGDFISKLEEHKTYCKDFVKAYCTPFGYNLVRYKNLTIDGLFDKNYPGKDDSDEQK

SEQ ID NO: 2 - protein, 954 aa, Artificial Sequence
  Eubacterium siraeum nCas1 HEPN-/-
MGKKIHARDLREQRKTDRTEKFADQNKKREAERAVPKKDAAVSVKSVSSVSSKKDNVTKSMAKAAGVKSVFAVGNTVYMTSFGRGNDAVLEQKIVDTSHEPLNIDDPAYQLNVVTMNGYSVTGHRGETVSAVTDNPLRRFNGRKKDEPEQSVPTDMLCLKPTLEKKFFGKEFDDNIHIQLIYNILDIEKILAVYSTNAIYALNNMSADENIENSDFFMKRTTDETFDDFEKKKESTNSREKADFDAFEKFIGNYRLAYFADAFYVNKKNPKGKAKNVLREDKELYSVLTLIGKLAHWCVASEEGRAEFWLYKLDELKDDFKNVLDVVYNRPVEEINNRFIENNKVNIQILGSVYKNTDIAELVRSYYEFLITKKYKNMGFSIKKLRESMLEGKGYADKEYDSVRNKLYQMTDFILYTGYINEDSDRADDLVNTLRSSLKEDDKTTVYCKEADYLWKKYRESIREVADALDGDNIKKLSKSNIEIQEDKLRKCFISYADSVSEFTKLIYLLTRFLSGKEINDLVTTLINKFDNIRSFLEIMDELGLDRTFTAEYSFFEGSTKYLAELVELNSFVKSCSFDINAKRTMYRDALDILGIESDKTEEDIEKMIDNILQIDANGDKKLKKNNGLRNFIASNVIDSNRFKYLVRYGNPKKIRETAKCKPAVRFVLNEIPDAQIERYYEACCPKNTALCSANKRREKLADMIAEIKFENFSDAGNYQKANVTSRTSEAEIKRKNQAIIRLYLTVMYIMLKNLVNVNARYVIAFHCVERDTKLYAESGLEVGNIEKNKTNLTMAVMGVKLENGIIKTEFDKSFAENAANRYLRNARWYKLILDNLKKSERAVVNEFANTVCALNAIRNININIKEIKEVENYFALYHYLIQKHLENRFADKKVERDTGDFISKLEEHKTYCKDFVKAYCTPFGYNLVRYKNLTIDGLFDKNYPGKDDSDEQK

SEQ ID NO: 3 - protein, 919 aa, Artificial Sequence
  Uncultured Ruminococcus sp. nCas1
MAKKNKMKPRELREAQKKARQLKAAEINNNAAPAIAAMPAAEVIAPAAEKKKSSVKAAGMKSILVSENKMYITSFGKGNSAVLEYEVDNNDYNQTQLSSKDNSNIQLGGVNEVNITFSSKHGFESGVEINTSNPTHRSGESSPVRGDMLGLKSELEKRFFGKTFDDNIHIQLIYNILDIEKILAVYVTNIVYALNNMLGVKGSESHDDFIGYLSTNNIYDVFIDPDNSSLSDDKKANVRKSLSKFNALLKTKRLGYFGLEEPKTKDNRVSQAYKKRVYHMLAIVGQIRQCVFHDKSGAKRFDLYSFINNIDPEYRDTLDYLVEERLKSINKDFIEDNKVNISLLIDMMKGYEADDIIRLYYDFIVLKSQKNLGFSIKKLREKMLDEYGFRFKDKQYDSVRSKMYKLMDFLLFCNYYRNDIAAGESLVRKLRFSMTDDEKEGIYADEAAKLWGKFRNDFENIADHMNGDVIKELGKADMDFDEKILDSEKKNASDLLYFSKMIYMLTYFLDGKEINDLLTTLISKFDNIKEFLKIMKSSAVDVECELTAGYKLFNDSQRITNELFIVKNIASMRKPAASAKLTMFRDALTILGIDDKITDDRISGILKLKEKGKGIHGLRNFITNNVIESSRFVYLIKYANAQKIREVAKNEKVVMFVLGGIPDTQIERYYKSCVEFPDMNSSLGVKRSELARMIKNISFDDFKNVKQQAKGRENVAKERAKAVIGLYLTVMYLLVKNLVNVNARYVIAIHCLERDFGLYKEIIPELASKNLKNDYRILSQTLCELCDKSPNLFLKKNERLRKCVEVDINNADSSMTRKYRNCIAHLTVVRELKEYIGDICTVDSYFSIYHYVMQRCITKRENDTKQEEKIKYEDDLLKNHGYTKDFVKALNSPFGYNIPRFKNLSIEQLFDRNEYLTEK

SEQ ID NO: 4 - protein, 919 aa, Artificial Sequence
  Uncultured Ruminococcus sp. nCas1 HEPN-/-
MAKKNKMKPRELREAQKKARQLKAAEINNNAAPAIAAMPAAEVIAPAAEKKKSSVKAAGMKSILVSENKMYITSFGKGNSAVLEYEVDNNDYNQTQLSSKDNSNIQLGGVNEVNITFSSKHGFESGVEINTSNPTHRSGESSPVRGDMLGLKSELEKRFFGKTFDDNIHIQLIYNILDIEKILAVYVTNIVYALNNMLGVKGSESHDDFIGYLSTNNIYDVFIDPDNSSLSDDKKANVRKSLSKFNALLKTKRLGYFGLEEPKTKDNRVSQAYKKRVYHMLAIVGQIAQCVFADKSGAKRFDLYSFINNIDPEYRDTLDYLVEERLKSINKDFIEDNKVNISLLIDMMKGYEADDIIRLYYDFIVLKSQKNLGFSIKKLREKMLDEYGFRFKDKQYDSVRSKMYKLMDFLLFCNYYRNDIAAGESLVRKLRFSMTDDEKEGIYADEAAKLWGKFRNDFENIADHMNGDVIKELGKADMDFDEKILDSEKKNASDLLYFSKMIYMLTYFLDGKEINDLLTTLISKFDNIKEFLKIMKSSAVDVECELTAGYKLFNDSQRITNELFIVKNIASMRKPAASAKLTMFRDALTILGIDDKITDDRISGILKLKEKGKGIHGLRNFITNNVIESSRFVYLIKYANAQKIREVAKNEKVVMFVLGGIPDTQIERYYKSCVEFPDMNSSLGVKRSELARMIKNISFDDFKNVKQQAKGRENVAKERAKAVIGLYLTVMYLLVKNLVNVNARYVIAIHCLERDFGLYKEIIPELASKNLKNDYRILSQTLCELCDKSPNLFLKKNERLRKCVEVDINNADSSMTRKYANCIAALTVVRELKEYIGDICTVDSYFSIYHYVMQRCITKRENDTKQEEKIKYEDDLLKNHGYTKDFVKALNSPFGYNIPRFKNLSIEQLFDRNEYLTEK

SEQ ID NO: 5 - protein, 408 aa, Artificial Sequence
  Gut_metagenome_contig2791000549
MKQNDRENNNKIKKSAAKAVGVKSLARLSDGSTVVSSFGKGAAAELESLITGGEIRKLSDKAILEITDDTQNKNAYNVKSSRIPNLTARTDKLSDKSGMDDLGFKRELELEVFGQCFDDSIHIQIAHAVFDIQKSLAAVIPNVLYTLNNLDRSYSTDNTSDKKDIIGNTLNYQHSYESFNVEKRGEFTEYYNAAKDRFSYFPDILCVLEKVNGKDRYQPKSEKDAFNVLSSVNMLRNSLFHFAPKSNDGKARIAVFKNQFDSDFSHITSTVNKIYSAKIAGVNENFLNNEGNNLYIILKATNWDIKKIVPQLYRFSVLKSDKNMGFNMRKLREFAVESKNIDLSRLNDKFLTNNRKKLYKVIDFIIYYHLNKVLKDSFVDDFVAALRASQSEEEKEKLYAQYSERLFA

SEQ ID NO: 6 - protein, 295 aa, Artificial Sequence
  Gut_metagenome_contig855000317
TDNPLHGAGGIARDHSDLIHARKALEMRYYGQTFEDNIHIQLIYNILDIEKILSVHINNIVYTLNNLLRPLTDNNFDFIGELSTYRDYEKFLEVSEIEYIIDENGEEKQNKEYTKRKLFFRLCYMPQLRYFNIIVEGPHEPVVQVENPELLKKIEASRISDRAKTVTFNEKEFYNVLIALGTLRQMEAHGNPLINIYQFDKKQNVYSTLTKKYKERVITLDNGFLSRAKKNLIILFRAYGIEDAEEKKQYIRNYYDFTVRKNYKNQGFSIKTLREHITTDIEEAIQLRSTAFDSV

SEQ ID NO: 7 - protein, 159 aa, Artificial Sequence
  Gut_metagenome_contig3389000027
PEKAAFTVHNDCEAFFEIDGRVQRAVADNPLHKYEKDDHGQDRISREKLEMRYYGRTFEDNIHIQVIYNILDIEKIMSIHINNIIFTINNLLRREEEDFSDLIGYITLCEKYEDLSKKGREEIRDSFDRLCKAPQLAYYNFQIEKKGKKDPNAIILTEK

SEQ ID NO: 8 - protein, 108 aa, Artificial Sequence
  Gut_metagenome_contig8061000170
EVTGRGQGATADNPLYKYSQKKAWDRQDRISKDKLELRYYGQTFEDNIHIQTIYNILDIEKILSIHINNIVFTINNLLRNDNDEQDDIVGYISLCKKYADLSKEKNAE

SEQ ID NO: 9 - protein, 237 aa, Artificial Sequence
  Gut_metagenome_contig1509000299
MKSTFVLGENNLLMTSFGKGNKAVVEKQIRDQQITDLSDPSAFTVKQDKDLHFNIDGRVRGASTDNPFHHNPEKTAQPPVRDDLIHARSFLEKRYYGENFTDNIHIQCIYSILDVEKILVSHINNIVYMLNNFLREEGETLTDLIGYLSIFKSYEGLMNSTRNDAAEMRRHFFSLCQAKQLGYLNLEVLKPQPDKPKQGKKKPADPNTIKLTEEEFFNVLLALSNMRQMLVHGNAKQ

SEQ ID NO: 10 - protein, 214 aa, Artificial Sequence
  Gut_metagenome_contig9549000591
KAKLEKRYFGQTFEDNIHIQVIYNMLDIEKILTIHVNNIVFTINNFLREEGEDLTDIVGYITKYKSLAKFKENKNAREYYELFCKLCDAKQLGYLNLEYNSVRSKLYKLFDFILVHHYKNDSSPESTALKNLLRTCLTDEEKEKVYVQTAKELTALYSYHFKEASVSVNARNIKEYQEKAQVYHISIADKISSTGIGLFSQLIYMLTLLLDGKE

SEQ ID NO: 11 - protein, 422 aa, Artificial Sequence
  Gut_metagenome_contig71000500
MKKQKSKKTVSKTSGLKEALSVQGTVIMTSFGKGNMANLSYKIPSSQKPQNLNSSAGLKNVEVSGKKIKFQGRHPKIATTDNPLFKPQPGMDLLCLKDKLEMHYFGKTFDDNIHIQLIYQILDIEKILAVHVNNIVFTLDNVLHPQKEELTEDFIGAGGWRINLDYQTLRGQTNKYDRFKNYIKRKELLYFGEAFYHENERRYEEDIFAILTLLSALRQFCFHSDLSSDESDHVNSFWLYQLEDQLSDEFKETLSILWEEVTERIDSEFLKTNTVNLHILCHVFPKESKETIVRAYYEFLIKKSFKNMGFSIKKLREIMLEQSDLKSFKEDKYNSVRAKLYKLFDFIITYYYDHHAFEKEALVSSLRSSLTEENKEEIYIKTARTLASALGADFKKAAADVNAKNIRDYQKKANDYRISFED

SEQ ID NO: 12 - protein, 49 aa, Artificial Sequence
  exemplary Cas13d sequence from human gut metagenome
IKIGNTGIGYFSELIYMLTLLLDGKEINDLLTTLINKFDNIISFIDILK

SEQ ID NO: 13 - protein, 148 aa, Artificial Sequence
  Gut_metagenome_contig3915000357
MKDKLEQWYFDKTFDDNIHIQLIYQIQDIEKILASHVNNIVFALDNILHATESETGDFLGMGYMRATNTFEEYRDSAISNVKKSYETFETYIKKKELLYFGEAFYHGNTCRKPEDIYHILAMVSSLRQFCFHSTFDDKSKSIKGSWLY

SEQ ID NO: 14 - protein, 137 aa, Artificial Sequence
  Gut_metagenome_contig4719000173
KNVITSRSFYYLVRYAKPTAVRKLMSNPKIVRYVLKRLPENQVASYYSAIWTQSESNSNETVKLIEMIDRLTTEIAGFSFAVLKDKKDSIVSASRESRAVNLEVERLKKLTTLYMSIAYIAVKSLVKVNARYFIAYS

SEQ ID NO: 15 - protein, 95 aa, Artificial Sequence
  Gut_metagenome_contig6929000468
MKTIKKSSKAYGLKSTFAYNDDVYMTSFGKGNDFVMEKLIYPNDNVEDLSDNPKFDVEVENKDITLKYKKSEINVNNPAKSGIKQDYLMLKDKLE

SEQ ID NO: 16 - protein, 114 aa, Artificial Sequence
  Gut_metagenome_contig7367000486
NRLKTKADLERLFSNRRIGYFGQAFYESDKQQRNEMEIYDNLALIGSLRQWAVHGNKTNDPAWLYKLESLPDEFKSVLDKVYAETVRKVNYKFIKTNAVNLQILQELYPKESFA

SEQ ID NO: 17 - protein, 107 aa, Artificial Sequence
  Gut_metagenome_contig7930000403
YAKIIIGEITSKYNKFDDIINLVYREIRNRNNTINFKNEIKNISTITNYSYFTKFIYFITKFLDGKEINELLTSLINKFDNIQAFNDILLEKLQDKNESKFAIFNGK

SEQ ID NO: 18 - protein, 282 aa, Artificial Sequence
  Gut_metagenome_contig993000527
NIDSLTAVYKGVNNQNRVEFGDKYDMFNKAGEICESLRSINSFARMESPAPAAKRTMFVDAIRMFGFADVSDNDAEKFYKENIEPFIYDRNGDIEDEWKKGKLVHKKDEKKKGVYNFIATNVIESNRFQYLVRYANTEKIAALARNETIVRFVIKKLPAAQIVRYYIACNRIRENINSNVLTSDDMAESLVKLVTGMDFGKIKGVRNDDRSGDKEMKKAIVTLYLTILYHLTKNLVYVNSRYFMAFHCLERDMNLFGEGQKQALRNTGDYPADNADLRRSDI

SEQ ID NO: 19 - protein, 118 aa, Artificial Sequence
  Gut_metagenome_contig6552000639
AVDLNPDDPAFNVNEVTEERFILDHGRIKGCIATADNPLHASSAPQDMLLLKSVLEERFFGMSFPEDNVHIQLIYNILDIEKILTVYSTNAVYAINNLFRADDQEDDEFIGDLSVDTS

SEQ ID NO: 20 - protein, 87 aa, Artificial Sequence
  Gut_metagenome_contig11932000246
RIVNSFAHMKKESMSAKKIMFDEALIVLGIDDAEKERELDQMLDKDARKQNPQRAGLRNFIANNVIESDRFKYLVRYGNVKRIKGIA

SEQ ID NO: 21 - protein, 85 aa, Artificial Sequence
  Gut_metagenome_contig12963000286
EKETELNLMLDKDARKQNRQKAGLRNFIANNVIESERFKYLVRYGNVKRIKGLSTNSQVMGFVLKDIADAQIVRYYRSIYGDDNC

SEQ ID NO: 22 - protein, 155 aa, Artificial Sequence
  Gut_metagenome_contig2952000470
IRLPNGTIMDECDVSKATTVKNRYLHNKKWYSLAFTNYKNSDSDVIVNFRNSVAHLNAIRNIDEYIDGIGEINSHTGYFEIYHYIIQKRMQAVTTDKSKLQPKTEEYFENLSKYHTYCKDFVKAYCVPMAYNLPRYKNLTIDGQFDRNIHTETKE

SEQ ID NO: 23 - protein, 406 aa, Artificial Sequence
  Gut_metagenome_contig451000394
LQELYPKESFASIVKEYYGFLVTKKYKNIGFSIKHLREILLDSTDYRDKEYDSVRHKLYQLLDFCIYHGYLYEDAEFAADLVNQLRASLSELDKEKIYNIEAARLADKLGSSLFSYLRRSVVGKNIQQLKKNAENLEKVKLEDIQISSGKTVSYFTKLMYLLTLFLDGKEINDLLTTLINKFDNIRVFNKTLTQLNQSTEFVEDYSFFGSSGTVFEELTVLNSFARMSRIDPSARKDMYRDAIEILGISMEMSHEKFEEMLDRILCYDEEGNPIINPDGTKKSGMRNFIATNIISSNRFKYLVRYGNATKIRALANCENAVKFVLSTIPDEQIVRYFDSCREPTDHIENNIERKREYLASIIKEMSFERFRDAEKLQRYHVDRPTNGSSVEGEQKQRYQAVIRLYL

SEQ ID NO: 24 - protein, 954 aa, Artificial Sequence; identical to SEQ ID NO: 1
  Eubacterium_siraeum_DSM_15702

SEQ ID NO: 25 - protein, 173 aa, Artificial Sequence
  gut_metagenome_P19E0k2120140920,_c369000003
DGKEINDLVTTLINKTENIASFNEVLKQLGYELDYSEEYSVFAASDEMASQLRALNSFARMEKPDASAKRIMFVEAARMLGDDSSYEELKAYFDDILAKKSKKEFDAATDNEAIRATDKKKKGFRNFIINNVIESDRFKYLIRYCNVESVQAFSKNRKLVKFVLKDIPESQIL

SEQ ID NO: 26 - protein, 111 aa, Artificial Sequence
  Gut_metagenome_contig7593000362
RMSEEAPSAKKVMYVEAAKVLGYSEPEEDLETYIEGILDKKKNVDASGKKNMNFRNFIANNVIESRRFKYLVRYCNPEKIRAMAENRKVVSFVLKGIPDAQIRAYYNSCNG

SEQ ID NO: 27 - protein, 86 aa, Artificial Sequence
  Gut_metagenome_contig12619000055
KLNAGFADKAKTDMQVLLDVLKIKGQEKEIEIAQNYYEFIVKKGYKNEGFSIKKLRQKLTSLSESEKEPLNSMRYDSVRPKLNHLL

SEQ ID NO: 28 - protein, 236 aa, Artificial Sequence
  Gut_metagenome_contig1405000151
KELFQKLCKAPQLAYFNLQIETEGKRKADPNAIKLTQEDFFSILYTLGYMRQMLMHGAPNQNIYKMDPLKDKTFKNCLDCLNRLYNERVMALNNNFLDLAKKNLSILFDVFAVKTQEEKAEYVRDYYDFVVRKQFKNQGFSIKCLREHMTDDIEEAGTLRDQKYDSVRGKLYPFINFAIFRYYNSHSSEAEALVERLRASMNEEEKDKVYRHEAVILWSKIRNLVLKHILPEMEGS

SEQ ID NO: 29 - protein, 103 aa, Artificial Sequence
  Chicken_gut_metagenome_c298474
SDHDKKALVQEYYEFVVLKNYKNLGFSIRRLRDTIIARETGADILSDTEYDTVRSKLYRAMDFKIYLYYQEHPEKAKTLIECLRASTEEAEKEWIYRREASAV

SEQ ID NO: 30 - protein, 225 aa, Artificial Sequence
  Gut_metagenome_contig1516000227
NKFDGESCKSFPLLMYLLCKFLDAKEVNELLTSIINKLENIESLIDALVTLNKWDGFSSNYSLFDKQNIRSLINDFRLVKNLSSSKRKLKKAKQYEYQKNKQLYADAINLFKKDNFVHLNDEEGTGLDLYLSTLLTKKSGNRGDKVKNFIESAIIKNRRFVYLIRYADPEKCYKLVHNEKMLRFVLGEYNEEMMPLSQLQKYYNAVTENNDSNCENRNKMIDTLV

SEQ ID NO: 31 - protein, 210 aa, Artificial Sequence
  Gut_metagenome_contig1838000319
LEYQITPENDVVKLPVSNSSSITVNSANDNIFEVTTSRSDLKDLEAKPSNPTKKSKSSEKSPRQDMLGLKSALEKEYFGKEFNDNIHIQIIHCIQDIEKILAVYSTNANYALVNLLGHNFKDESGKREDFLGSDAFKIEMSYESFSAPANETKLSSEKERTRENEEKRLKYLEDFNNMTDPDNYDKRLGYFGEAFFKPSKNRGKDTVADT

SEQ ID NO: 32 - protein, 84 aa, Artificial Sequence
  Gut_metagenome_contig13123000268
SPKDAGLAYRPAGVRPDQIGAKAALEKRYFGKETPGDNIHVQIAYQIQDIEKLLAVYISNIIYAVNNVTGVSAMKDSKGRPVDL

SEQ ID NO: 33 - protein, 115 aa, Artificial Sequence
  Gut_metagenome_contig5294000434
DKVVHVNVAQGIRDFIEDFKSNSDFSMNSYFELYNYLMQRMLVNEYTKKANDFKVEVPELLITYKNNLDKYKTYDRNFLHIINMPFAYNLARYKNLTIEDIFYDNYKDKLKTKRG

SEQ ID NO: 34 - protein, 377 aa, Artificial Sequence
  Gut_metagenome_contig6415000192
VNSDASDFCKLIYVFTRFLDGKEINILLNSLIKKFQDIHSFNTTVKKLSENNLIINADYVDDYSLFEQSGTVARELMLIKSISKMDFGLDNINLSFMYDDALRTLGVSDENLPEVKREYFGKTKNLSAYIRNNVLENRRFKYVIKYIHPSDVQKIACNKAIAGFVLNRMPDTQIKRYYDSLINKGATDIQAQAKALLDCITGISFDAIKDDKHLHKSKEKSPQRSADRERKKAMLTLYYTIVYIFVKQMLHINSLYTIGFFYLERDQRFIYSRAKKENKNPSKNSYLNDFRSVTAYFIPSEIMKRIEKNENKGFLEDFEALWNSCGKTSRLRKEDVLLYARYISPDHALKNYKMILNSYRNKIAHINVIMSAGKYTG

SEQ ID NO: 35 - protein, 123 aa, Artificial Sequence
  Gut_metagenome_contig6144000300
NKDILKLVIQELPETQILRYYSTIGKNKTTSIDEMKQCLIDAIYNFNIDDTLNAIGDSRVINEKKEQSKAIINLYLTVIYLVTKNMVKINTRFSIAFACLERDYYLHFGQPNGKLLYLQLTEE

SEQ ID NO: 36 - protein, 101 aa, Artificial Sequence
  Gut_metagenome_contig9118000041
DTDCDTQYELFNGDNPGKLANELRICKSLSRMKPEMDEIKKPLYKDALNILNIGNEEFDENTFEFLNREKGDHKLRNFIVNNVIESTRFMYVVKYMNPSNC

SEQ ID NO: 37 - protein, 331 aa, Artificial Sequence
  Activated_sludge_metagenome_transcript_124486
MVKTKAEIHQILRFLGTIRQCLAHKKDAKWDIIFNPDSMSNEFKTLIDSYYNGRVKALNDDFIKHNRSSSLPILFHYYGATEENRRAELTEGFYDFIIKRENKNMGFSLKKIREKMLEKQEASFIKEDGYNSVRHKLYILMDFIIYKTYAADIELQESIVATLRSNLTDEDKEATYEIQAKALWNKIGDDIVKKLMPLIDGNKIKGYKDEKIEIKKEWLKDVMISTENASYMTKMVYFMTLFLDGKEINEFLTVLINKFENIQGFFDVLGHNALAEKIEEPKEISKRPLKGFAELAAFTQKSTDVGLTEHLRLFENSVNISDEIRVTKNFA

SEQ ID NO: 38 - protein, 245 aa, Artificial Sequence
  Gut_metagenome_contig1322000437
INELLTTLINKFDDIQSLMDIATSKQVNVPCKFTSDYSIFNNSSRIVKELNVVKNVARMQKPTASVKTDMLMDALTLLGTDDTMDSEKLRNYVRVQIMKLDAEGKTSKSDDHTLRNFLINNVINSSRFIYVIKYVKADTAYALGHNRKAVAYVLHRIPEQQIDRYYSSCIDRDAGNRMEKENALVDMIVKLSFRDIENVSNDNEKASEKQRYRAVVGLYLTVIYELVKNIVNINSRYVIAFHSLE

SEQ ID NO: 39 - protein, 139 aa, Artificial Sequence
  Gut_metagenome_contig4582000531
SNDHALRNFIVNNVISSSRFTYIIKFINANIAYKIGHNRKAVSYVIKKLPPDQIDRYFTSCIGQESKQAEISDKRQALIDMITTLDYYRFTDINNEDIQKKEQYKAIIGLYLTVVYRLVKNIVNINSRYVIAFHCLERD

SEQ ID NO: 40 - protein, 100 aa, Artificial Sequence
  Gut_metagenome_contig9190000283
FVLNSIPDLQLDRYYKAITGKSDGNRVEKTDIIMDKLMKLDFNQLKVNEDQMGKKNIYFVEKLKALVGLYLTIIYLLTKSLVKINSIYILAFSCFERDYR

SEQ ID NO: 41 - protein, 213 aa, Artificial Sequence
  Gut_metagenome_contig1709000510
PKFKSGSHAQKYYGFIIFKSHKNLGFSIKELRKKLFDIEDAKAFSKKQYDSVRFKMNKLIDFFITYHYTTIDKKQADKLVSKLRYSIDEKEKDDIYTTEAEDLWNKYKSSFEQIRAYVSPDIITEYEHQATNFEYEIKKFDPSTELKTFFSKMIYVLCMFLDGKEINELLSTLINKFDNIDSFITTSEGITDECRFTGTGEKKNIYDIFNASG

SEQ ID NO: 42 - protein, 946 aa, Artificial Sequence
  M24_(LSQX01212483_Anaerobic_digester_metagenome)
MNNKRKTKAKAAGLKSVFFDQKQAVLTTFAKGNNSQIEKKVVNSEVKDLRQPPAFDLELKEKTFYISGKNNINTSRENPLASASLPLSKRQRIRAERIKRAREENRPYHNVKRVGEDDLRAKADLEKHYFGKEYSDNLKIQIIYNILDINKIISPYINDIVYSMNNLARNDEYIDGKIDVIGSLSSTTDYSSFMSPNKDLEKEKKFSFHRENYKKFVEASKPYMRYYGKVFIRDVKKSKLSTGKGEKIEVMYRSDEEIFTIFQILSYVRQSIMHNDIGNKSSILAIEKYPARFVGFLSDLLKTKTNDVNRMFIDNNSQTNFWVLFSIFGLQDHTSGADKICRNFYDFVIKADSKNLGFSLKKIRELMLDLPNANMLRDHQFDTVRSKFYTLLDFIIYQHYLEEKSRIDNMVEKLRMTLKEEEKEVLYAAEAKIVWNAIGAKVINKLVPMMNGDALKEIKRKNRDRKLPQSVIATVQVNSDANVFSGLIYFLTLFLDGKEINEMVSNLITKFENIDSLLHVDREIYKSDEKDLDLEIEKLALFFKGVVRPNAKTDTGAGEISKSFSIFQSAERIIEELKFIKNVTRMDNEIFPSEGVFLDAANVLGVRGDDFDFSNEFVGDDLHSDANKKIINKINGTKEDRNLRNFIINNVVKSRRFQYIARHMNTHYVKQLANNETLNRFVLNKMGDAKIINRYYESISGNTPNIEVRSQIDYLVKRLRSFSFEDLNDVKQKVRPGTNESIEKEKKKALVGLCLTIQYLVYKNLVNINARYTTAFYCLERDSKLKGFGVDVWRDFESYTALTNHFIKEGYLPVRKAEILRANLKHLDCEDGFKYYRNQVTHLNAIRVAYKYINEIKSVHSYFALYHYIMQRHLYDSLQAKAKDSSGFVIDALKKSFEHKIYSKDLLHVLHSPFGYNTARYKNLSIEALFDKNESRPEVNPLSTND

SEQ ID NO: 43 - protein, 150 aa, Artificial Sequence
  Gut_metagenome_contig3833000494
EEASDFKDKKNDSDRRKLYKLMDFCIFYLYYSDSKRNEDLVSRLRESLTDENKDIIYSKEAKTVWNELRKKFSTILDNVKGANIKKLEDVKEKFISEDEFDDIKLDIDISYFSKLMYVMCYFLDGKKINDLLTTLVSKFDNIGSIIEAAK

SEQ ID NO: 44 - protein, 123 aa, Artificial Sequence
  Activated_sludge_metagenome_transcript_117355
MEKMEKIRKSENRKSRAKAAGLKSTFVVADKLALTSFGKGNKANLEKIIKNEEVEEINKPPKFDAKVEEKQIHIIGKTIKDGITEKPAGMRNDLIGAKQELEKMFFGKTFDDNIHIQLIYNIL

SEQ ID NO: 45 - protein, 84 aa, Artificial Sequence
  Gut_metagenome_contig11061000330
SQRDSTINPGEKQISVEKLNPKMVQYAKAVINHGTYCKDAVKALCVPFAYQLVRYKNLTIDGLFDKNHPGDKKEAKTLALDDDV

SEQ ID NO: 46 - protein, 418 aa, Artificial Sequence
  Gut_metagenome_contig338000322
FDNIISFIDILKKLNLEFKFKPEYADFFNMTNCRYTLEELRVINSIARMQKPSADARKIMYRDALRILGMDNRPDEEIDRELERTMPVGADGKFIKGKQGFRNFIASNVIESSRFHYLVRYNNPHKTRTLVKNPNVVKFVLEGIPETQIKRYFDVCKGQEIPPTSDKSAQIDVLARIISSVDYKIFEDVPQSAKINKDDPSRNFSDALKKQRYQAIVSLYLTVMYLITKNLVYVNSRYVIAFHCLERDAFLHGVTLPKMNKKIVYSQLTTHLLTDKNYTTYGHLKNQKGHRKWYVLVKNNLQNSDITAVSSFRNIVAHISVVRNSNEYISGIGELHSYFELYHYLVQSMIAKNNWYDTSHQPKTAEYLNNLKKHHTYCKDFVKAYCIPFGYVVPRYKNLTINELFDRNNPNPEPKEEV

SEQ ID NO: 47 - protein, 418 aa, Artificial Sequence; identical to SEQ ID NO: 46
  exemplary Cas13d sequence from human gut metagenome

SEQ ID NO: 48 - protein, 109 aa, Artificial Sequence
  Gut_metagenome_contig9530000097
KSKHYRQCVKEDLLNARKLHTDDYNIDAIRAFRNAVAHLDVVRNMSAYIEGIREINSYYGLYHYLAQRCLQKRCNGALDDNTDYFRTLDKYNTYVKDFVKALCVPFAYN

SEQ ID NO: 49 - protein, 213 aa, Artificial Sequence
  Gut_metagenome_contig1750000258
STPDKARESLRDMLHNISFNDFADVKQDDRRATPEEKVEKERYKAIIGLYLTVMYHLVKNLVYVNSRYVMAFHCLERDAMHYDVCLDNYRDLIRHLISDGDSSCNHFISHNKRMRGCIEEDVNNSEQLIFGKEDAVIRFRNNVAHLSAIRNANEYIDDIREITSYFALYHYLMQRKLIDDCKVNDTAHKYFEKLTKYKTYVMDMVKALCSPFG

SEQ ID NO: 50 - protein, 131 aa, Artificial Sequence
  Gut_metagenome_contig5377000274
KENDILKKSRKKSSVKANGLKSVFVMENKALMTSFGKGNKANPEKELVGGEIRELTDSPVFDASNLGNIIEISRRGVRIEKKGYIASDYEIHKDVINAKDKLEERYFGSAMDDNIHIQMVYQILDIEKILS

SEQ ID NO: 51 - protein, 255 aa, Artificial Sequence
  gut_metagenome_P19E0k2120140920_c248000089
YSADMIDELAGIIHDMKFKQFENVDQSAKRGTPEAADKQQKQNVIRLYLTVCYLFFKNLIYVNSRYFLAFYCLERDVKLWGKTPKFGSREEDTSYTVLTREFMDSGKISTKSKSKNGAESPDEAAKHIPRNYIQKNLDNSDDVAIRYFRNAAEHINALQCAANYLENVEDTESYYRIYHYIMQRYIMQSYSQDKSGGKYDKADARDINDKTKEYFELVENHNTYCKDFVKALCVPFAYNLARFKNLSIDGLFDKN

SEQ ID NO: 52 - protein, 89 aa, Artificial Sequence
  Gut_metagenome_contig11400000031
NIVKHVLKDIPDTQIERYYKSYFNTENAANAEIMREKLASALMQVKYDEFKNVKQKVKNGTEEAFEKERKKALVRLYLTVVYIFVKNLV

SEQ ID NO: 53 - protein, 109 aa, Artificial Sequence
  Gut_metagenome_contig7940000191
NHIDHLNAVRNADKYLNDVRQVTSWYELFHYIVQRALFDDYLKALSYNPDAGKELNPRTLEYFAKVQKYGTCCKDFIKALNVPFAYNLPRYKNLSIDGLFDMNRPGEKG

SEQ ID NO: 54 - protein, 124 aa, Artificial Sequence
  Gut_metagenome_contig6049000251
LYLTSFGKGNAAVIEQKIEPENGYRVTGMQITPSITVNKATDESVRFRVKRKIAQKDEFIADNPMHEGRHRIEPSAGSDMLGLKTKLEKYYFGKEFDDNLHIQIIYNILDIEKILAVYSTNITA

SEQ ID NO: 55 - protein, 233 aa, Artificial Sequence
  Gut_metagenome_contig1137000500
MKKKKNLREQREAKKQERLAACSAKTKAAEIPAAEKPVATTPIAEPVKTDSKKKSSVKAAGLKSTLVLDNKLYTTSFGKGNEAVIEQEVNTADYTVANVNSTPSLEIRSAGDKELSFSSHRQFVNKDELSAVNPLYGGKDKPRKPAGKDMLGLKDKLEERYFGKSFNDNIHIQIIYNILDIEKILAVYATNITVALDHMIDKDVNIEKEDFIGYMNTLNTYEVFMDPSKNPKL

SEQ ID NO: 56 - protein, 69 aa, Artificial Sequence
  Gut_metagenome_contig9368000105
QRHVAEGVEPNRHDFAERFPYYAALYQYHSYVKDFVKALNAPFGYNIPRFKNLTIEELFDRNIHIETYV

SEQ ID NO: 57 - protein, 358 aa, Artificial Sequence
  Gut_metagenome_contig546000275
MDSYRPKLYKLIDFCIFKHYHEYTEISEKNVDTLRAAVSEEQKESFYADEAKRLWGIFDKQFLGFCKKINVWVNGSHEKEILGYIDKDAYRKKSDVSYFSKFLYAMSFFLDGKEINDLLTTLINKFDNIASFISTAKELDAEIDRILEKKLDPVTGKPLKGKNSFRNFIANNVIENKRFIYVIKFCNPKNVLKLVKNTKVTEFVLKRMPESQIDRYYSSCIDTEKNPSVDKKISDLAEMIKKIAFDDFRNVRQKTRTREESLEKERFKAVIGLYLTVVYLLIKNLVNVNSRYVMAFHCLERDAKLYGINIGKNYIELTEDLCRENENSRSAYLARNKRLRDCVKQNIDNAKNMKSKEK

SEQ ID NO: 58 - protein, 114 aa, Artificial Sequence
  Gut_metagenome_contig7216000573
KEMIYANEATFLWDKLGRTFLNFCDNIGAWVKNDHTEEIETYIDKDAYKTSSKVSYFSKLLYAMCFFLDGKEINDLLTTLINKFDNIGSFIETAKELGLSVTFIKDYAFFNASK

SEQ ID NO: 59 - protein, 136 aa, Artificial Sequence
  Gut_metagenome_contig4806000409
LIDSKRLRYFGFEYDPDGKNKNEEMKKRLYHLVAFAGQLRQWSFHSEGNFQLEWLYKLDDSRIAQEYRDTLDYFFDRRFDELNNNFVEQNATNLFILKETFPGEDLKAVTDLYYDFIIVKSQKNIGFSIKKLREKM

SEQ ID NO: 60 - protein, 94 aa, Artificial Sequence
  Gut_metagenome_contig10762000480
CFDTELNPMTEIKIQNLAQKMKDMDFTNFRDVQQKSRDPEKNREKERFKAIIGLYLTVVYRLVKNLADVNARYVMAFHSLERDSSLYNEPVVWK

SEQ ID NO: 61 - protein, 149 aa, Artificial Sequence
  Gut_metagenome_contig4114000374
DTKINPQTWLYQLENTPDLDNEYRDTLDHFFDERFNEINEHFVTQNATNLCIMKEVFPDEDFKSIADLYYDFIVVKSYKNIGFSIKKLREKMLELPEAKRVTSTEMDSVRSKLYKLIDFCIFKHYHEKPETVEMIVSMLRAYTSEDMKE

SEQ ID NO: 62 - protein, 933 aa, Artificial Sequence
  Ruminococcus_flavefaciens_FD1
MKKKMSLREKREAEKQAKKAAYSAASKNTDSKPAEKKAETPKPAEIISDNSRNKTAVKAAGLKSTIISGDKLYMTSFGKGNAAVIEQKIDINDYSFSAMKDTPSLEVDKAESKEISFSSHHPFVKNDKLTTYNPLYGGKDNPEKPVGRDMLGLKDKLEERYFGCTFNDNLHIQIIYNILDIEKILAVHSANITTALDHMVDEDDEKYLNSDYIGYMNTINTYDVFMDPSKNSSLSPKDRKNIDNSRAKFEKLLSTKRLGYFGFDYDANGKDKKKNEEIKKRLYHLTAFAGQLRQWSFHSAGNYPRTWLYKLDSLDKEYLDTLDHYFDKRFNDINDDFVTKNATNLYILKEVFPEANFKDIADLYYDFIVIKSHKNMGFSIKKLREKMLECDGADRIKEQDMDSVRSKLYKLIDFCIFKYYHEFPELSEKNVDILRAAVSDTKKDNLYSDEAARLWSIFKEKFLGFCDKIVVWVTGEHEKDITSVIDKDAYRNRSNVSYFSKLMYAMCFFLDGKEINDLLTTLINKFDNIANQIKTAKELGINTAFVKNYDFFNHSEKYVDELNIVKNIARMKKPSSNAKKAMYHDALTILGIPEDMDEKALDEELDLILEKKTDPVTGKPLKGKNPLRNFIANNVIENSRFIYLIKFCNPENVRKIVNNTKVTEFVLKRIPDAQIERYYKSCTDSEMNPPTEKKITELAGKLKDMNFGNFRNVRQSAKENMEKERFKAVIGLYLTVVYRVVKNLVDVNSRYIMAFHSLERDSQLYNVSVDNDYLALTDTLVKEGDNSRSRYLAGNKRLRDCVKQDIDNAKKWFVSDKYNSITKYRNNVAHLTAVRNCAEFIGDITKIDSYFALYHYLIQRQLAKGLDHERSGFDRNYPQYAPLFKWHTYVKDVVKALNAPFGYNIPRFKNLSIDALFDRNEIKKNDGEKKSDD

SEQ ID NO: 63 - protein, 70 aa, Artificial Sequence
  Gut_metagenome_contig7093000170
RQLAVGLDPKRSGFERNYPYFAKLFEWHTYVKDMVKALNAPFGYNIPRFKNLSIDDLFDMNEERVKDAKA

SEQ ID NO: 64 - protein, 91 aa, Artificial Sequence
  Gut_metagenome_contig11113000384
ASENERKAKQQAGQPAAKGNGEEKQKPILKLNPVRERKLSTTLKSRAKAAGLKSTFVINDKELLMTAFGRGNDAIPEKRILGAQVETLSEK

SEQ ID NO: 65 - protein, 119 aa, Artificial Sequence
  Gut_metagenome_contig6403000259
NKVKEFELDASVKYRLSKVVESVRLKDKATYFTKLIYLTTLFLDGKEINDLLTTLIHQFENIASFIDVMKDRGIADGFSGEYKFFESSKQVAFELRNVNSFARMTKASKDDDNAKQIMF

SEQ ID NO: 66 - protein, 123 aa, Artificial Sequence
  Gut_metagenome_contig6193000124
AEDYYDFLFKKTYKYLGFSIKTLREEFLTIKDAEKLKDKKYDSVRSKLYKVIDFLIFDLYQNRECLRINELVQRLRLSTDELTKAKIYADEAHFVYKKLWDIIDTEIVPQLDQKGIKALEEAY

SEQ ID NO: 67 - protein, 320 aa, Artificial Sequence
  Gut_metagenome_contig721000619
KEGSTMAKNEKKKSTAKALGLKSSFVVNNDIYMTSFGKGNKAVLEKKITENTIENKSDTTYFDVINRDPKGFTLEGRRIADMTAFSNDPKYHVNVVNGKFLEDQLGARSELEKKVFGRTFDDNVHIQLIHNILDIEKIMAQYVSDIVYLLHNTIKRDMNDDIMGYISIRNSFDDFCHPERIPDRKAKDNLQKQHDIFFDEILKCGRLAYFGNAFFEDGSDNKEIAKLKRYKEIYHIIALMGSLRQSYFHGENSDKNFQGPTWAYTLESNLTGKYKEFKDTLDKTFDERYEMISKDFGSTNMVNLQILEELLKMLYGNVSP

SEQ ID NO: 68 - protein, 220 aa, Artificial Sequence
  Gut_metagenome_contig1666000270
KELKFRINGKFIKNYHDRYDEDSANRRWKVVTKQNDVNLFCKLIYMMTLLLDGKEINDLLTTLVNKFDNIASFIDVMEDMGIEHRFIGGYDMFADSKKICVDLQMINSFARMQVTMKSAKKMLYRDALVILGMDQSEEEIERFMLENNIIKDNNEDKSEKKQHDFRNFLINSVINSSRFRYMVRYSSADGLRKLKKSRKLIGFVLNSLPETLIDRYYHSC

SEQ ID NO: 69 - protein, 204 aa, Artificial Sequence
  Gut_metagenome_contig2002000411
EKQNKAKYQAIISLYLMVMYQIVKNMIYVNSRYVIAFHCLERDSNQLLGRFNSRDASMYNKLTQKFITDKYLNDGAQGCSKKVGNYLSHNITCCSDELRKEYRNQVDHFAVVRMIGKYAADIGKFSTWFELYHYVMQRIIFDKRNPLSETERTYKQLIAKHHTYCKDLVKALNTPFGYNLARYKNLSIGELFDRNNYNAKTKET

SEQ ID NO: 70 - protein, 944 aa, Artificial Sequence
  Ruminococcus_albus
MAKKSKGMSLREKRELEKQKRIQKAAVNSVNDTPEKTEEANVVSVNVRTSAENKHSKKSAAKALGLKSGLVIGDELYLTSFGRGNEAKLEKKISGDTVEKLGIGAFEVAERDESTLTLESGRIKDKTARPKDPRHITVDTQGKFKEDMLGIRSVLEKKIFGKTFDDNIHVQLAYNILDVEKIMAQYVSDIVYMLHNTDKTERNDNLMGYMSIRNTYKTFCDTSNLPDDTKQKVENQKREFDKIIKSGRLGYFGEAFMVNSGNSTKLRPEKEIYHIFALMASLRQSYFHGYVKDTDYQGTTWAYTLEDKLKGPSHEFRETIDKIFDEGFSKISKDFGKMNKVNLQILEQMIGELYGSIERQNLTCDYYDFIQLKKHKYLGFSIKRLRETMLETTPAECYKAECYNSERQKLYKLIDFLIYDLYYNRKPARIEEIVDKLRESVNDEEKESIYSVEAKYVYESLSKVLDKSLKNSVSGETIKDLQKRYDDETANRIWDISQHSISGNVNCFCKLIYIMTLMLDGKEINDLLTTLVNKFDNIASFIDVMDELGLEHSFTDNYKMFADSKAICLDLQFINSFARMSKIDDEKSKRQLFRDALVILDIGNKDETWINNYLDSDIFKLDKEGNKLKGARHDFRNFIANNVIKSSRFKYLVKYSSADGMIKLKTNEKLIGFVLDKLPETQIDRYYESCGLDNAVVDKKVRIEKLSGLIRDMKFDDFSGVKTSNKAGDNDKQDKAKYQAIISLYLMVLYQIVKNMIYVNSRYVIAFHCLERDFGMYGKDFGKYYQGCRKLTDHFIEEKYMKEGKLGCNKKVGRYLKNNISCCTDGLINTYRNQVDHFAVVRKIGNYAAYIKSIGSWFELYHYVIQRIVFDEYRFALNNTESNYKNSIIKHHTYCKDMVKALNTPFGYDLPRYKNLSIGDLFDRNNYLNKTKESIDANSSIDSQ

SEQ ID NO: 71 - protein, 449 aa, Artificial Sequence
  Gut_metagenome_contig13552000311
LIDFLIYDLYYNRKPARIEEIVDKLRESVNDEEKESIYSAETKYVYEALGKVLVRSLKKYLNGATIRDLKNRYDAKTANRIWDISEHSKSGHVNCFCKLIYMMTLMLDGKEINDLLTTLVNKFDNIASFIDVMDELGLEHSFTDNYKMFADSKAICLDLQFINSFARMSKIDDEKSKRQLFRDALVVLDIGDKNEDWIEKYLTSDIFKRDENGNKIDGEKRDFRNFIANNVIKSARFKYLVKYSSADGMIKLKKNEKLISFVLEQLPETQIDRYYESCGLDCAVADRKVRIEKLTGLIRDMRFDNFRGVNYSNDACKKDKQAKAKYQAIISLYLMVLYQIVKNMIYVNSRYVIAFHCLERDLLFFNIELDNSYQYSNCNELTEKFIKDKYMKEGALGFNMKAGRYLTKNIGNCSNELRKIYRNQVDHFAVVRKIGNYAADIASVGSWFE

SEQ ID NO: 72 - protein, 96 aa, Artificial Sequence
  Gut_metagenome_contig10037000527
YMDQNFANSDAWAIHVYRNKIQHLDAVRHADMYIGDIREFHSWFELYHYIIQRRIIDQYAYESTPGSSRDGSAIIDEERLNPATRRYFRLITTYKT

SEQ ID NO: 73 - protein, 519 aa, Artificial Sequence
  Gut_metagenome_contig238000329
RYDKDRSKIYTMMDFVIYRYYIDNNNDSIDFINKLRSSIDEKSKEKLYNEEANRLWNKLKEYMLYIKEFNGKLASRTPDRDGNISEFVESLPKIHRLLPRGQKISNFSKLMYLLTMFLDGKEINDLLTTLINKFENIQGFLDIMPEINVNAKFEPEYVFFNKSHEIAGELKLIKGFAQMGEPAATLKLEMTADAIKILGTEKEDAELIKLAESLFKDENGKLLGNKQHGMRNFIGNNVIKSKRFHYLIRYGDPAHLHKIATNKNVVRFVLGRIADMQKKQGQKGKNQIDRYYEVCVGNKDIKKTIEEKIDALTDIIVNMNYDQFEKKKAVIENQNRGKTFEEKNKYKRDNAEREKFKKIISLYLTVIYHILKNIVNVNSRYILGFHCLERDKQLYIEKYNKDKLDGFVALTKFCLGDEERYEDLKAKAQASIQALETANPKLYAKYMNYSDEEKKEEFKKQLNRERVKNARNAYLKNIKNYIMIRLQLRDQTDSSGYLCGEFRDKVAHLEVARHAHEYI

SEQ ID NO: 74 - protein, 181 aa, Artificial Sequence
  Gut_metagenome_contig2643000492
NGEIVSLAEKEAFSAKIADKNIGCKIENKQFRHPKGYDVIADNPIYKGSPRQDMLGLKETLEKRYFSPSDSIDNVRVQVAHNILDIEKILAEYITNAVYSFDNIAGFGKDIIGDDFSPVYTYDKFEKSDRYEYFKNLLNNSRLGYYGQAFFECDDSKENKKKKDAIKCYNIIALLSGLRHW

SEQ ID NO: 75 - protein, 440 aa, Artificial Sequence
  Gut_metagenome_contig874000057
MSKNKESYAKGMGLKSALVSGSKVYMTSFEGGNDAKLEKVVENSEIVSLAEKESFSAEIFKKNIGCKIENKKFKHPKRYDVIADNPLYKGSVRQDMLGLKETLEKRYFNSADGTDNVCIQVIHNILDIEKILAEYITNAVYSFDNIAGFGEDIIGMGGFKPIYTYKQFKEPDKYNKKFDDILNNSRLGYYGKAFFEKNDLKHNPNKKKRDKNPYILKYDNECYYIIALLSGLRHWNIHSHAKDDLVSYRWLYNLDSILNREYISTLNYLYDDIADELTESFSKNSSANVNYIAETLNIDPSEFAQQYFRFSIMKEQKNMGFNVSKLREIMLDRKELSDIRDNHRVFDSIRSKLYTMMDFVIYRYYIEEAAKTEAENRNLPENEKKISEKDFFVINLRGSFDENQKEKLYIEEAKRLWEKLKDIMLKIKEFRGEKVKEYKK

SEQ ID NO: 76 - protein, 137 aa, Artificial Sequence
  Gut_metagenome_contig4781000489
LDKQLDYEYIRTLNYMFNDIADELTRTFSKNSAANVNYIAETLNIDPNKFAEQYFRFSIMKEQKNLGFNLTKLRESMLDRRELSDIRDNHNVFDSIRPKLYTMMDFVIYKHYIDEAKKTEAENKSLPDDRKNLSEKD

SEQ ID NO: 77 - protein, 87 aa, Artificial Sequence
  Gut_metagenome_contig12144000352
RMGEPVANTKRVMMIDAVKILGTDLSDDELKEMADSFFKDSDGNLLKKGKHGMRNFITNNVIKNKRFHYLIRYGDPAHLHEIAKNEA

SEQ ID NO: 78 - protein, 414 aa, Artificial Sequence
  Gut_metagenome_contig5590000448
VHNNEEKDLIKYTWLYNLDKYLDAEYITTLNYMYNDIGDELTDSFSKNSAANINYIAETLGIDPKTFAEQYFRFSIMKEQKNLGFNLTKLREVMLDRKDMSEIRENHNDFDSIRAKVYTMMDFVIYRYYIEEAAKVNAANKSLPDNEKSLSEKDIFVISLRGSFNEDQKDRLYYDEAQRLWSKVGKLMLKIKKFRGKDTRKYKNMGTPRIRRLIPEGRDISTFSKLMYALTMFLDGKEINDLLTTLINKFDNIQSFLKVMPLIGVNAKFAEEYSFFNNSEKIADELRLIKSFARMGEPVADARRAMYIDAIRILGTDLSDDELKALADSFSLDENGNKLGKGKHGMRNFIINNVITNKRFHYLIRYGNPVHLHEIAKNEAVVKFVLGRIADIQKKQGQNGKNQIDRYYETCIGK

SEQ ID NO: 79 - protein, 109 aa, Artificial Sequence
  Gut_metagenome_contig9269000031
LSEKDIFVISLRGSFNEDQKDRLYYDEAQRLWSKLGKLMLKIKEFKGKDTKKYRDMGKPRLRRILPEGRDISTFSKLMYALTMFLDGKEINDLLTTLINKFDNIQSFLK

SEQ ID NO: 80 - protein, 105 aa, Artificial Sequence
  Gut_metagenome_contig8537000520
SARLADELRIVKSVSRMEMPMPAAKTLMFEDALKLFWIDSPEEAKKIISGDNKKIRNFIANNVVESSWFNYIVRYTDLKNARDFIRCRPIVEFVLNKVPETQIDR

SEQ ID NO: 81 - protein, 211 aa, Artificial Sequence
  Gut_metagenome_contig1845000130
SSLNEVEKDAIYAEEAKQAWVNIRDLVIRHILPMMKGDYIAQISVEDEKIDQSILEDVFISKITPSALAEFIYIVTLFIDGKEINDLLTQMIHKFDSIAAFQEVMRQRCMVTQFNQDYAIFEQSGKIAEDLRVVNSFARMSISKDGPNVKGAMFREALLILGLASPDETMESVLQKYMNSNLDRERKSVRNFVINNVIQSRRFHYLVRYGN

SEQ ID NO: 82 - protein, 906 aa, Artificial Sequence
  gut_metagenome_P13E0k2120140920_c3000072
MEREVKKPPKKSLAKAAGLKSTFVISPQEKELAMTAFGRGNDALLQKRIVDGVVRDVAGEKQQFQVQRQDESRFRLQNSRLADRTVTADDPLHRAETPRRQPLGAGMDQLRRKAILEQKYFGRTFDDNIHIQLIYNILDIHKMLAVPANHIVHTLNLLGGYGETDFVGMLPAGLPYDKLRVVKKKNGDTVDIKADIAAYAKRPQLAYLGAAFYDVTPGKSKRDAARGRVKREQDVYTILSLMSLLRQFCAHDSVRIWGQNTPAALYGLQALPQDMKDLLDDGWRRALGGVNDHFLDTNKVNLLTLFEYYGAETKQERVALTQDFYRFVVLKEQKNMGFSLRRLREELLKLPDAAYLTGQEYDSVRQKLYMLLDFLLCRLYAQERADRCEELVSALRCALSDEEKDAVYQAEAAALWQALGDTLRRELLPLLKGKKLQDKDKKKLDELGLSRDVLDGVLFRPAQQGSRANADYFCRLMHLSTWFMDGKEINTLLTTLISKLENIDSLRSVLESMGLAYSFVPAYAMFDHSRYIAGQLRVVNNIARMRKPAIGAKREMYRAAVVLLGVDSPEAAAAITDDLLQIDPETGKVRPRGDSARDTGLRNFVANNVVESRRFTYLLRYMTPEQARVLAQNEKLIAFVLSTVPSAQLERYCRTCGREDITGRPAQIRYLTAQIMGVRYESFTDVEQRGRGDNPKKERYKALIGLYLTVLYLAVKNMVNCNARYVIAFYCRDRDTALYQKEVCWYDLEEDKKSGKQRQVEDYTALTRYFVSQGYLNRHACGYLRSNMNGISNGLLAAYRNAVDHLNVIPPLGSLCRDIGRVDSYFALYHYAVQQYLNGRYYRKTPREQELFAAMAQHRTWCSDLVKALNTPFGYNLARYKNLSIDGLFDREGDHVVREDGEKPAE

SEQ ID NO: 83 - protein, 906 aa, Artificial Sequence
  gut_metagenome_P1E0k2120140920_c1000078
MEREVKKPPKKSLAKAAGLKSTFVISPQEKELAMTAFGRGNDALLQKRIVDGVVRDVAGEKQQFQVQRQDESRFRLQNSRLADRTVTADDPLHRAETPRRQPLGAGMDQLRRKAILEQKYFGRTFDDNIHIQLIYNILDIHKMLAVPANHIVHTLNLLGGYGETDFVGMLPAGLPYDKLRVVKKKNGDTVDIKADIAAYAKRPQLAYLGAAFYDVTPGKSKRDAARGRVKREQDVYAILSLMSLLRQFCAHDSVRIWGQNTTAALYHLQALPQDMKDLLDDGWRRALGGVNDHFLDTNKVNLLTLFEYYGAETKQARVALTQDFYRFVVLKEQKNMGFSLRRLREELLKLPDAAYLTGQEYDSVRQKLYMLLDFLLCRLYAQERADRCEELVSALRCALSDEEKDTVYQAEAAALWQALGDTLRRKLLPLLKGKKLQDKDKKKSDELGLSRDVLDGVLFRPAQQGSRANADYFCRLMHLSTWFMDGKEINTLLTTLISKLENIDSLRSVLESMGLAYSFVPAYAMFDHSRYIAGQLRVVNNIARMRKPAIGAKREMYRAAVVLLGVDSPEAAAAITDDLLQIDPETGKVRPRSDSARDTGLRNFIANNVVESRRFTYLLRYMTPEQARVLAQNEKLIAFVLSTVPDTQLERYCRTCGREDITGRPAQIRYLTAQIMGVRYESFTDVEQRGRGDNPKKERYKALIGLYLTVLYLAVKNMVNCNARYVIAFYCRDRDTALYQKEVCWYDLEEDKKSGKQRQVEDYTALTRYFVSQGYLNRHACGYLRSNMNGISNSLLTAYRNAVDHLNAIPPLGSLCRDIGRVDSYFALYHYAVQQYLNGRYYRKTPREQELFAAMAQHRTWCSDLVKALNTPFGYNLARYKNLSIDGLFDREGDHVVREDGEKPAE

SEQ ID NO: 84 - protein, 84 aa, Artificial Sequence
  Gut_metagenome_contig12990000099
INDLLTTLIHKFENIAAFLHVIQAEKLPVEFVPEFQVFSDSQKIAEELRIINSFARMNKPSANAREIMYIEAFKVLGMSGDEKQ

SEQ ID NO: 85 - protein, 345 aa, Artificial Sequence
  Gut_metagenome_contig525000349
MSKKENRKSYVKGLGLKSTLVSDSKVYLTTFADGSNAKLEKCVENNKIICISNDKEAFAASIANKNVGYKIKNDEKFRHPKGYDIISNNPLLHNNSVQQDMLGLKNVLEKRYFGKSSGGDNNLCIQIIHNIIDIEKILSEYIPNVVYAFNNIAGFKDEHNNIIDIIGTQTYNSSYTYADFSKDKSDKKYIEFQKLLKNKRLGYWGKAFFTGQGNNAKVRQENQCFHIIALLISLRNWATHSNELDKHTKRTWLYKLDDTNILNAEYVKTLNYLYDTIADELTKSFSKNGAVNVNYLAKKYNIKDDLPGFSEQYFRFSIMKEQKNLGFNISKLRENMLDFKDMSVI

SEQ ID NO: 86 - protein, 206 aa, Artificial Sequence
  Gut_metagenome_contig7229000302
KKISSLTKFCLGESDEKKLKALAKKSLEELKTTNSKLYENYIKYSDERKAEEAKRQINRERAKTAMNAHLRNTKWNDIMYGQLKDLADSKSRICSEFRNKAAHLEVARYAHMYINDISEVKSYFRLYHYIMQRRIIDVIENNPKAKYEGKVKVYFEDVKKNKKYNKNLLKLMCVPFGYCIPRFKNLSIEQMFDMNETDNSDKKKEK

SEQ ID NO: 87 - protein, 95 aa, Artificial Sequence
  Gut_metagenome_contig3227000343
IGDISEVNSYFQLYHYIMQRILIDKIGSKTTGKAKEYFDSVIVNKKYDDRLLKLLCSPLGYCLTRYKDLSIEALFDMNEAAKYDKLNKERKNKKK

SEQ ID NO: 88 - protein, 115 aa, Artificial Sequence
  Gut_metagenome_contig7030000469
SIRSKLYTMMDFVIYRYYIEESAKAAAENKPSESDSFVIRLRGSFNENQKEELYIEEAERLWKKFGEIMLKIKEFRGEKVKEYKKEVPRIERILPHGKDISAFSKLMYMLSMFLD

SEQ ID NO: 89 - protein, 110 aa, Artificial Sequence
  Gut_metagenome_contig5149000068
FRNKVAHLEAVRYAHLYINDIAEVNSYFQLYHYIIQRRIMAECYDKSSGKVREYFNAVNKEKKYNDRLLKLLCVPFGYCVTRFKDLSIEALFDKNEADRFDKEKKKAEKK

SEQ ID NO: 90 - protein, 84 aa, Artificial Sequence
  Gut_metagenome_contig400200045
MIEKKKSYAKGMGLKSTIVSGSKVYMTTFGDGSEARLEKVVENDSIKTLHEGEAFSAEMTDNNAGYKIGNVKFSHPNGYDVVAN

SEQ ID NO: 91 - protein, 94 aa, Artificial Sequence
  Gut_metagenome_contig10420000446
SSKSVAEKVNALTKIITGMNYDQFDSRRNVIENTGAGNAEREKYKKIISLYLTVIYHILKNIVNINSRYVIGFHCVERDAQLYKEKGYDINLKK

SEQ ID NO: 92 - protein, 967 aa, Artificial Sequence
  new_flavefaciens,_strain_XPD3002
MIEKKKSFAKGMGVKSTLVSGSKVYMTTFAEGSDARLEKIVEGDSIRSVNEGEAFSAEMADKNAGYKIGNAKFSHPKGYAVVANNPLYTGPVQQDMLGLKETLEKRYFGESADGNDNICIQVIHNILDIEKILAEYITNAAYAVNNISGLDKDIIGFGKFSTVYTYDEFKDPEHHRAAFNNNDKLINAIKAQYDEFDNFLDNPRLGYFGQAFFSKEGRNYIINYGNECYDILALLSGLRHWVVHNNEEESRISRTWLYNLDKNLDNEYISTLNYLYDRITNELTNSFSKNSAANVNYIAETLGINPAEFAEQYFRFSIMKEQKNLGFNITKLREVMLDRKDMSEIRKNHKVFDSIRTKVYTMMDFVIYRYYIEEDAKVAAANKSLPDNEKSLSEKDIFVINLRGSFNDDQKDALYYDEANRIWRKLENIMHNIKEFRGNKTREYKKKDAPRLPRILPAGRDVSAFSKLMYALTMFLDGKEINDLLTTLINKFDNIQSFLKVMPLIGVNAKFVEEYAFFKDSAKIADELRLIKSFARMGEPIADARRAMYIDAIRILGTNLSYDELKALADTFSLDENGNKLKKGKHGMRNFIINNVISNKRFHYLIRYGDPAHLHEIAKNEAVVKFVLGRIADIQKKQGQNGKNQIDRYYETCIGKDKGKSVSEKVDALTKIITGMNYDQFDKKRSVIEDTGRENAEREKFKKIISLYLTVIYHILKNIVNINARYVIGFHCVERDAQLYKEKGYDINLKKLEEKGFSSVTKLCAGIDETAPDKRKDVEKEMAERAKESIDSLESANPKLYANYIKYSDEKKAEEFTRQINREKAKTALNAYLRNTKWNVIIREDLLRIDNKTCTLFRNKAVHLEVARYVHAYINDIAEVNSYFQLYHYIMQRIIMNERYEKSSGKVSEYFDAVNDEKKYNDRLLKLLCVPFGYCIPRFKNLSIEALFDRNEAAKFDKEKKKVSGNS

SEQ ID NO: 93 - protein, 146 aa, Artificial Sequence
  M26_Gut_metagenome_contig698000307
MIEKKKSFAKGMGVKSTLVSGSKVYMTTFAEGSDAKLEKIVEGDSIRSVNEGEAFSAEMADKNAGYKIGNAKFSHPKGYAVVANNPLYTGPVQQDMLGLKETLEKRYFGESADGNDNICIQVIHNILDIEKILAEYITNAAYSVTD

SEQ ID NO: 94 - protein, 724 aa, Artificial Sequence
  M36_Uncultured_Eubacterium_sp_TS28_c40956
RIRFVLSGIFVNAFSSKHGFESGVEINTSNPTHRSGESSPVRGDMLGLKSELEKRFFGKTFDDNIHIQLIYNILDIEKILAVYVTNIVYALNNMLGVKGSESHDDFIGYLSTNNTYDVFIDPDNSSLSDDKKANVRKSLSKFNVLLKTKRLGYFGLEEPKTKDNRVSEAYKKRVYHMLAIVGQIRQCVFHDKSGAKRFDLYSFINNIDPEYRDTLDYLVEERLKSINKDFIQGNKVNISLLIDMMKGYEADDIIRLYYDFIVLKSQKNLGFSIKKLREKMLEEYGFRFKDKQYDSVRSKMYKLMDFLLFCNYYRNDIAAGEALVRKLRFSMTDDEKEGLYADEAAKLWGKFRNDFENIADHMNGDVIKELGKADMDFDEKILDSEKKNASDLLYFSKMIYMLTYFLDGKEINDLLTTLISKFDNIKEFLKIMKSSAVNVECELTAGYKLFNDSQRITNELFIVKNIASMRKPAASAKLTMFRDALTILGIDDKITDDRISEILKLKEKGKGIHGLRNFITNNVIESSRFVYLIKYANAQKIRKVAENEKVVMFVLGGIPDTQIERYYKSCVEFPDMNSSLEVKRSELARMIKNISFDDFKNVKQQAKGQRKRRLRRGQKAVIGLYLTVMYLLVKNLVNVNARYVIAIHCLERDFGLYKEIIPELASKNLKNDYRILSQTLCELCDKSPNLFLKKNERLRKCVEVDINNADSSMTRKYRNCIAHL

SEQ ID NO: 95 - protein, 219 aa, Artificial Sequence
  M12_gut_metagenome_P25C0k2120140920_c134000066
MAKKNKMKPRELREAQKKARQFKAAEINNNAAPAIAAMPAAEVIAPVAEKKKSSVKAAGMKSILVSENKMYITSFGKGNSAVLEYEVDNNDYNKTQLSSKDNSNIELCGVNEVNITFSSKHGFESGVEINTSNPTHRSGESSPVRWDMLGLKSELEKRFFGKTFDDNIHIQLIYNILDIEKILAVYVTNIVYALNNMLGVKGSESHDDFIGYLSTNNIY

SEQ ID NO: 96 - protein, 915 aa, Artificial Sequence
  exemplary Cas13d sequence from human gut metagenome
MAKKNKMKPRELREAQKKARQFKAAEINNNAAPAIAAMPAAEVIAPVAEKKKSSVKAAGMKSILVSENKMYITSFGKGNSAVLEYEVDNNDYNKTQLSSKDNSNIELCGVNEVNITFSSKHGFESGVEINTSNPTHRSGESSPVRWDMLGLKSELEKRFFGKTFDDNIHIQLIYNILDIEKILAVYVTNIVYALNNMLGVKGSESHDDFIGYLSTNNIYDVFIDPDNSSLSDDKKANVRKSLSKFNVLLKTKRLGYFGLEEPKTKDTRVSQAYKKRVYHMLAIVGQIRQCVFHDKSGAKRFDLYSFINNIDPEYRETLDYLVDERFDSINKGFIQGNKVNISLLIDMMKGYEADDIIRLYYDFIVLKSQKNLGFSIKKLREKMLEEYGYRFKDKQMYKLMDFLLFCNYYRNDVVAGEALVRKLRFSMTDDEKEGIYADEASKLWGKFRNDFENIADHMNGDVIKELGKADMDFDEKILDSEKKNASDLLYFSKMIYMLTYFLDGKEINDLLTTLISKFDNIKEFLKIMKSSAVDVECELTAGYKLFNDSQRITNELFIVKNIASMRKPASSAKLTMFRDALTILGIDDNITDDRISEILKLKEKGKGIHGLRNFITNNVIESSRFVYLIKYANAQKIREVAKNEKVVMFVLGGIPDTQIERYYKSCVEFPDMNSSLEVKRSELARMIKNISFDDFKNVKQQAKGRENVAKERAKAVIGLYLTVMYLLVKNLVNVNARYVIAIHCLERDFGLYKEIIPELASKNLKNDYRILSQTLCELCDNGDESPNLFLKKNKRLRKCVEVDINNADSNMTRKYRNCIAHLTVVRELKEYIGDIRTVDSYFSIYHYVMQRCITKREDDTKQEEKIKYEDDLLKNHGYTKDFVKALNSPFGYNIPRFKNLSIEQLFDRNEYLTEK

SEQ ID NO: 97 - protein, 922 aa, Artificial Sequence
  M10_gut_metagenome_P25C90k2120140920,_c28000041
MAKKNKMKPRELREAQKKARQFKAAEINNNAAPAIAAMPAAEVIAPVAEKKKSSVKAAGMKSILVSENKMYITSFGKGNSAVLEYEVDNNDYNKTQLSSKDNSNIELCGVNEVNITFSSKHGFESGVEINTSNPTHRSGESSPVRWDMLGLKSELEKRFFGKTFDDNIHIQLIYNILDIEKILAVYVTNIVYALNNMLGVKGSESHDDFIGYLSTNNIYDVFIDPDNSSLSDDKKANVRKSLSKFNVLLKTKRLGYFGLEEPKTKDTRVSQAYKKRVYHMLAIVGQIRQCVFHDKSGAKRFDLYSFINNIDPEYRETLDYLVDERFDSINKGFIQGNKVNISLLIDMMKGYEADDIIRLYYDFIVLKSQKNLGFSIKKLREKMLEEYGYRFKDKQYDSVRSKMYKLMDFLLFCNYYRNDVVAGEALVRKLRFSMTDDEKEGIYADEASKLWGKFRNDFENIADHMNGDVIKELGKADMDFDEKILDSEKKNASDLLYFSKMIYMLTYFLDGKEINDLLTTLISKFDNIKEFLKIMKSSAVDVECELTAGYKLFNDSQRITNELFIVKNIASMRKPASSAKLTMFRDALTILGIDDNITDDRISEILKLKEKGKGIHGLRNFITNNVIESSRFVYLIKYANAQKIREVAKNEKVVMFVLGGIPDTQIERYYKSCVEFPDMNSSLEVKRSELARMIKNISFDDFKNVKQQAKGRENVAKERAKAVIGLYLTVMYLLVKNLVNVNARYVIAIHCLERDFGLYKEIIPELASKNLKNDYRILSQTLCELCDNGDESPNLFLKKNKRLRKCVEVDINNADSNMTRKYRNCIAHLTVVRELKEYIGDIRTVDSYFSIYHYVMQRCITKREDDTKQEEKIKYEDDLLKNHGYTKDFVKALNSPFGYNIPRFKNLSIEQLFDRNEYLTEK

SEQ ID NO: 98 - protein, 922 aa, Artificial Sequence; identical to SEQ ID NO: 97
  M11_gut_metagenome_P25C7k2120140920_c4078000105

SEQ ID NO: 99 - protein, 636 aa, Artificial Sequence
  gut_metagenome_P25C0k2120140920_c32000045
IRQCVFHDKSGAKRFDLYSFINNIDPEYRETLDYLVDERFDSINKGFIQGNKVNISLLIDMMKGYEADDIIRLYYDFIVLKSQKNLGFSIKKLREKMLEEYGYRFKDKQYDSVRSKMYKLMDFLLFCNYYRNDVVAGEALVRKLRFSMTDDEKEGIYADEASKLWGKFRNDFENIADHMNGDVIKELGKADMDFDEKILDSEKKNASDLLYFSKMIYMLTYFLDGKEINDLLTTLISKFDNIKEFLKIMKSSAVDVECELTAGYKLFNDSQRITNELFIVKNIASMRKPASSAKLTMFRDALTILGIDDNITDDRISEILKLKEKGKGIHGLRNFITNNVIESSRFVYLIKYANAQKIREVAKNEKVVMFVLGGIPDTQIERYYKSCVEFPDMNSSLEVKRSELARMIKNISFDDFKNVKQQAKGRENVAKERAKAVIGLYLTVMYLLVKNLVNVNARYVIAIHCLERDFGLYKEIIPELASKNLKNDYRILSQTLCELCDNGDESPNLFLKKNKRLRKCVEVDINNADSNMTRKYRNCIAHLTVVRELKEYIGDIRTVDSYFSIYHYVMQRCITKREDDTKQEEKIKYEDDLLKNHGYTKDFVKALNSPFGYNIPRFKNLSIEQLFDRNEYLTEK

SEQ ID NO: 100 - protein, 929 aa, Artificial Sequence
  M13_gut_metagenome_P23C7k2120140920_c3000067
MAKKNKMKPRELREAQKKARQLKAAEINNNAAPAIAAMPAAQVIAPAAEKKKSSVKAAGMKSILVSENKMYITSFGKGNSAVLEYEVDKVDNNNYNKTQLSSKDNSNIELGDVNEVNITFSSKHGFESGVEINTSNPTHRSGESSPVRWDMLGLKSELEKRFFGKTFDDNIHIQLIYNILDIEKILAVYVTNIVYALNNMLGIKGSESYDDFMGYLSARNTYEVFTHPDKSNLSDKVKGNIKKSFSTFNDLLKTKRLGYFGLEEPKTKDTRVSEAYKKRVYHMLAIVGQIRQCVFHDLSEHSEYDLYSFIDNSKKVYRECRETLNYLVDERFDSINKGFIQGNKVNISLLIDMMKDDYEADDIIHLYYDFIVLKSQKNLGFSIKKLREKMLDEYGFRFKDKQYDSVRSKMYKLMDFLLFCNYYRNDVVAGEALVRKLRFSMTDDEKEGIYADEAEKLWGKFRNDFENIADHMNGDVIKELGKADMDFDEKILDSEKKNASDLLYFSKMIYMLTYFLDGKEINDLLTTLISKFDNIKEFLKIMKSSAVDVECELTAGYKLFNDSQRITNELFIVKNIASMRKPAASAKLTMFRDALTILGIDDKITDDRISEILKLKEKGKGIHGLRNFITNNVIESSRFVYLIKYANAQKIREVAKNEKVVMFVLGGIPDTQIERYYKSCVEFPDMNSSLKVKRSELARMIKNIRFDDFKNVKQQAKGRENVAKERAKAVIGLYLTVMYLLVKNLVNVNARYVIAIHCLERDFGLYKEIIPELASKNLKNDYRILSQTLCELCDDRDESPNLFLKKNRRLRKCVEVDINNADSSMTRKYRNCIAHLTVVRELKEYIGDIRTVDSYFSIYHYVMQRCITKREDDTKQEEKIKYEDDLLKNHGYTKDFVKALNSPFGYNIPRFKNLSIEQLFDRNEYLTEK

SEQ ID NO: 101 - protein, 923 aa, Artificial Sequence
  M5_gut_metagenome_P18E90k2120140920
MAKKNKMKPRELREAQKKARQLKAAEINNNAVPAIAAMPAAEVIAPAAEKKKSSVKAAGMKSILVSENKMYITSFGKGNSAVLEYEVDKVDDNDYNKTQLSSKDNSNIELGNVNEVNITFSSRRGFESGVEINTSNPTHRSGESSSVRGDMLGLKSELEKRFFGKTFDDNIHIQLIYNILDIEKILAVYVTNIVYALNNMLGVKGSESYDDFMGYLSAQNTYYIFTHPDKSNLSDKVKGNIKKSLSKFNDLLKTKRLGYFGLEEPKTKDKRVSEAYKKRVYHMLAIVGQIRQSVFHDKSNELDEYLYSFIDIIDSEYRDTLDYLVDERFDSINKGFIQGNKVNISLLIDMMKDDYEADDIIRLYYDFIVLKSQKNLGFSIKKLREKMLEEYGFRFKDKQYDSVRSKMYKIMDFLLFCNYYRNDVVAGEALVRKLRFSMTDDEKEGIYADEAAKLWGKFRNDFENIADHMNGDVIKELGKADMDFDEKILDSEKKNASDLLYFSKMIYMLTYFLDGKEINDLLTTLISKFDNIKEFLKIMKSSAVDVECELTAGYKLFNDSQRITNELFIVKNIASMRKPAASAKLTMFRDALTILGIDDNITDDRISEILKLKEKGKGIHGLRNFITNNVIESSRFVYLIKYANAQKIREVAKNEKVVMFVLGGIPDTQIERYYKSCVEFPDMNSSLEVKRSELARMIKNICFDDFKNVKQQAKGRENVAKERAKAVIGLYLTVMYLLVKNLVNVNARYVIAIHCLERDFGLYKEIVSELASKNLKNDYRILSQTLCELCDKSPNLFLKKNERLRKCVEVDINNADSSMTRKYRNCIAHLTVVRELKEYIGDIRAVDSYFSIYHYVMQRCITKRGNDTKQEDKIKYEDDLLKNHGYTKDFVKALNSPFGYNIPRFKNLSIEQLFDRNEYLTEK

SEQ ID NO: 102 - protein, 923 aa, Artificial Sequence; identical to SEQ ID NO: 101
  M21_gut_metagenome_P18E0k2120140920

SEQ ID NO: 103 - protein, 926 aa, Artificial Sequence
  M7_gut_metagenome_P38C7k2120140920_c4841000003
  SITE (551)..(551): Xaa is any amino acid
MAKKNKMKPRELREAQKKARQLKAAEINNNAAPAIAAMPAAEAIAPAAEKKKSSVKAAGMKSIFVSENKMYITSFGKGNSAVLEYEVDKVDNNVYNQTQLSSEDSSNIELCGVTKVNITFSSKHGLESGVEISTSNPTHRSGESSPVRWDMLGLKSELEKRFFGKTFDDNIHIQLIYNILDIEKILAVYVTNIVYALNNMLGIKDSESYDDFMGYLSARNTYKVFTHPDKSNLSDKVKGNIKKSFSTFNDLLKTKRLGYFGLEEPKTKDTRVSEAYKKRVYHMLAIVGQIRQCVFHDLSEHSEYDLYSFIDNSKKVYRECRETLNYLVDERFDSINKGFIQGNKVNISLLIDMMKDDYEADDIIHLYYDFIVLKSQKNLGFSIKKLREKMLDEYGFRFKDKQYDSVRSKMYKLMDFLLFCNYYRNDVVAGEALVRKLRFSMTDDEKEGIYADEAEKLWGKFRNDFENIADHMNGDVIKELGKADMDFDEKIIDSEKKNASDLLYFSKMIYMLTYFLDGKEINDLLTTLISKFDNIKEFLKIMKSSAVDVEXELTAGYKLFNDSQRITNELFIVKNIASMRKPAASAKLTMFRDALTILGIDDNITDDRISEILKLKEKGKGIHGLRNFITNNVIESSRFVYLIKYANAQKIREVAKNEKVVMFVLGGIPDTQIERYYKSCVEFPDMNSSLGVKRSELARMIKNISFDDFKNVKQQAKGRENVAKERAKAVIGLYLTVMYLLVKNLVNVNARYVIAIHCLERDFGLYKEIIPELASKNLKNDYRILSQTLCELCDKSPNLFLKKNERLRKCVEVDINNADSSMTRKYRNCIAHLTVVRELKEYIGDICTVDSYFSIYHYVMQRCITKRENDTKQEEKIKYEDDLLKNHGYTKDFVKALNSPFGYNIPRFKNLSIEQLFDRNEYLTEK

SEQ ID NO: 104 - protein, 918 aa, Artificial Sequence
  Ruminococcus_bicirculans
MAKKNKMKPRELREAQKKARQLKAAEINNNAVPAIAAMPAAEAAAPAAEKKKSSVKAAGMKSILVSENKMYITSFGKGNSAVLEYEVDNNDYNKTQLSSKDNSNIELCDVGKVNITFSSRRGFESGVEINTSNPTHRSGESSSVRGDMLGLKSELEKRFFGKNFDDNIHIQLIYNILDIEKILAVYVTNIVYALNNMLGEGDESNYDFMGYLSTFNTYKVFTNPNGSTLSDDKKENIRKSLSKFNALLKTKRLGYFGLEEPKTKDTRASEAYKKRVYHMLAIVGQIRQCVFHDKSGAKRFDLYSFINNIDPEYRETLDYLVDERFDSINKGFIQGNKVNISLLIDMMKGYEADDIIRLYYDFIVLKSQKNLGFSIKKLREKMLDEYGFRFKDKQYDSVRSKMYKLMDFLLFCNYYRNDIAAGESLVRKLRFSMTDDEKEGIYADEAAKLWGKFRNDFENIADHMNGDVIKELGKADMDFDEKILDSEKKNASDLLYFSKMIYMLTYFLDGKEINDLLTTLISKFDNIKEFLKIMKSSAVDVECELTAGYKLFNDSQRITNELFIVKNIASMRKPAASAKLTMFRDALTILGIDDKITDDRISEILKLKEKGKGIHGLRNFITNNVIESSRFVYLIKYANAQKIREVAKNEKVVMFVLGGIPDTQIERYYKSCVEFPDMNSSLGVKRSELARMIKNISFDDFKNVKQQAKGRENVAKERAKAVIGLYLTVMYLLVKNLVNVNARYVIAIHCLERDFGLYKEIIPELASKNLKNDYRILSQTLCELCDKSPNLFLKKNERLRKCVEVDINNADSSMTRKYRNCIAHLTVVRELKEYIGDICTVDSYFSIYHYVMQRCITKRENDTKQEEKIKYEDDLLKNHGYTKDFVKALNSPFGYNIPRFKNLSIEQLFDRNEYLTEK

SEQ ID NO: 105 - protein, 920 aa, Artificial Sequence
  our_cloned_CAG_Ncas1
MAKKNKMKPRELREAQKKARQLKAAEINNNAAPAIAAMPAAEAAAPAAEKKKSSVKAAGMKSILVSENKMYITSFGKGNSAVLEYEVDNNDYNQTQLSSKGSSNIELHGVNEVNITFSSKHGFESGVEINTSNPTHRSGESSPVRWDMLGLKSELEKRFFGKTFDDNIHIQLIYNILDIEKILAVYVTNIVYALNNMLGVKGSESHDDFIGYLSTNNTYDVFIDPDNSSLSDDKKANVRKSLSKFNVLLKTKRLGYFGLEEPKTKDTRVSQAYKKRVYLAIVGQIRQCVFHDKSGAKRFDLYSFINNIDPEYRETLDYLVDERFDSINKGFIEGNKINISLLIDMMKGYEADDIIRLYYDFIVLKSQKNLGFSIKKLREKMLDEYGFRFKDKQYDPVRSKMYKLMDFLLFCNHYRNDVAAGEALVRKLRFSMTDDEKEGIYADEAAKLWGKFRNDFENIADHMNGDVIKELGKADMDFDEKILDSEKKNASDLLYFSKMIYMLTYFLDGKEINDLLTTLISKFDNIKEFLKIMKSSAVDVECELTAGYKLFNDSQRITNELFIVKNIASMRKPAASAKLTMFRDALTILGIDDNITDDRISEILKLKEKGKGIHGLRNFITNNVIESSRFVYLIKYANAQKIREVAKNEKVVMFVLGGIPDTHIERYYKSCVEFPDMNSSLEAKRSELARMIKNISFDDFKNVKQQAKGRENVAKERAKAVIGLYLTVMYLLVKNLVNVNARYVIAIHCLERDFGLYKEIIPELASKNLKNDYRILSQTLCELCDDRDESPNLFLKKNKRLRKCVEVDINNADSSMTRKYRNCIAHLTVVRELKEYIGDIRTVDSYFSIYHYVMQRCITKRENDTKQEEKIKYEDDLLKNHGYTKDFVKALNSPFGYNIPRFKNLSIEQLFDRNEYLTEK

SEQ ID NO: 106 - protein, 922 aa, Artificial Sequence
  consensus_1
  SITE (89)..(89): Xaa is any amino acid
  SITE (386)..(386): Xaa is any amino acid
  SITE (789)..(790): Xaa is any amino acid
MAKKNKMKPRELREAQKKARQLKAAEINNNAAPAIAAMPAAEVIAPAAEKKKSSVKAAGMKSILVSENKMYITSFGKGNSAVLEYEVDXNNDYNKTQLSSKDNSNIELGDVNEVNITFSSKHGFESGVEINTSNPTHRSGESSPVRWDMLGLKSELEKRFFGKTFDDNIHIQLIYNILDIEKILAVYVTNIVYALNNMLGIKGSESYDDFMGYLSARNTYDVFTHPDKSNLSDKVKGNIKKSLSKFNDLLKTKRLGYFGLEEPKTKDTRVSEAYKKRVYHMLAIVGQIRQCVFHDKSGAKRFDLYSFIDNIDPEYRDTLDYLVDERFDSINKGFIQGNKVNISLLIDMMKGYEADDIIRLYYDFIVLKSQKNLGFSIKKLREKMLXEYGFRFKDKQYDSVRSKMYKLMDFLLFCNYYRNDVVAGEALVRKLRFSMTDDEKEGIYADEAAKLWGKFRNDFENIADHMNGDVIKELGKADMDFDEKILDSEKKNASDLLYFSKMIYMLTYFLDGKEINDLLTTLISKFDNIKEFLKIMKSSAVDVECELTAGYKLFNDSQRITNELFIVKNIASMRKPAASAKLTMFRDALTILGIDDNITDDRISEILKLKEKGKGIHGLRNFITNNVIESSRFVYLIKYANAQKIREVAKNEKVVMFVLGGIPDTQIERYYKSCVEFPDMNSSLEVKRSELARMIKNISFDDFKNVKQQAKGRENVAKERAKAVIGLYLTVMYLLVKNLVNVNARYVIAIHCLERDFGLYKEIIPELASKNLKNDYRILSQTLCELCDXXESPNLFLKKNKRLRKCVEVDINNADSSMTRKYRNCIAHLTVVRELKEYIGDIRTVDSYFSIYHYVMQRCITKREDDTKQEEKIKYEDDLLKNHGYTKDFVKALNSPFGYNIPRFKNLSIEQLFDRNEYLTEK

SEQ ID NO: 107 - protein, 922 aa, Artificial Sequence
  M18_gut_metagenome_P22E0k2120140920_c3395000078
MAKKNKMKPRELREAQKKARQLKAAEINNNAAPAIAAMPAAEVIAPVAEKKKSSVKAAGMKSILVSENKMYITSFGKGNSAVLEYEVDNNDYNKTQLSSKDNSNIELGDVNEVNITFSSKHGFGSGVEINTSNPTHRSGESSPVRGDMLGLKSELEKRFFGKTFDDNIHIQLIYNILDIEKILAVYVTNIVYALNNMLGIKDSESYDDFMGYLSARNTYEVFTHPDKSNLSDKVKGNIKKSLSKFNDLLKTKRLGYFGLEEPKTKDTRASEAYKKRVYHMLAIVGQIRQCVFHDKSGAKRFDLYSFINNIDPEYRDTLDYLVEERLKSINKDFIEGNKVNISLLIDMMKGYEADDIIRLYYDFIVLKSQKNLGFSIKKLREKMLEEYGFRFKDKQYDSVRSKMYKLMDFLLFCNYYRNDVAAGEALVRKLRFSMTDDEKEGIYADEAAKLWGKFRNDFENIADHMNGDVIKELGKADMDFDEKILDSEKKNASDLLYFSKMIYMLTYFLDGKEINDLLTTLISKFDNIKEFLKIMKSSAVDVECELTAGYKLFNDSQRITNELFIVKNIASMRKPAASAKLTMFRDALTILGIDDNITDDRISEILKLKEKGKGIHGLRNFITNNVIESSRFVYLIKYANAQKIREVAKNEKVVMFVLGGIPDTQIERYYKSCVEFPDMNSSLEAKRSELARMIKNISFDDFKNVKQQAKGRENVAKERAKAVIGLYLTVMYLLVKNLVNVNARYVIAIHCLERDFGLYKEIIPELASKNLKNDYRILSQTLCELCDDRNESSNLFLKKNKRLRKCVEVDINNADSSMTRKYRNCIAHLTVVRELKEYIGDIRTVDSYFSIYHYVMQRCITKRGDDTKQEEKIKYEDDLLKNHGYTKDFVKALNSPFGYNIPRFKNLSIEQLFDRNEYLTEK

SEQ ID NO: 108 - protein, 922 aa, Artificial Sequence; identical to SEQ ID NO: 107
  M17_gut_metagenome_P22E90k2120140920_c114

SEQ ID NO: 109 - protein, 922 aa, Artificial Sequence
  Ruminococcus_sp_CAG57
MAKKNKMKPRELREAQKKARQLKAAEINNNAAPAIAAMPAAEVIAPVAEKKKSSVKAAGMKSILVSENKMYITSFGKGNSAVLEYEVDNNDYNKTQLSSKDNSNIELGDVNEVNITFSSKHGFGSGVEINTSNPTHRSGESSPVRGDMLGLKSELEKRFFGKTFDDNIHIQLIYNILDIEKILAVYVTNIVYALNNMLGIKDSESYDDFMGYLSARNTYEVFTHPDKSNLSDKVKGNIKKSLSKFNDLLKTKRLGYFGLEEPKTKDTRASEAYKKRVYHMLAIVGQIRQCVFHDKSGAKRFDLYSFINNIDPEYRDTLDYLVEERLKSINKDFIEGNKVNISLLIDMMKGYEADDIIRLYYDFIVLKSQKNLGFSIKKLREKMLEEYGFRFKDKQYDSVRSKMYKLMDFLLFCNYYRNDVAAGEALVRKLRFSMTDDEKEGIYADEAAKLWGKFRNDFENIADHMNGDVIKELGKADMDFDEKILDSEKKNASDLLYFSKMIYMLTYFLDGKEINDLLTTLISKFDNIKEFLKIMKSSAVDVECELTAGYKLFNDSQRITNELFIVKNIASMRKPAASAKLTMFRDALTILGIDDNITDDRISEILKLKEKGKGIHGLRNFITNNVIESSRFVYLIKYANAQKIREVAKDEKVVMFVLGGIPDTQIERYYKSCVEFPDMNSSLEAKRSELARMIKNISFDDFKNVKQQAKGRENVAKERAKAVIGLYLTVMYLLVKNLVNVNARYVIAIHCLERDFGLYKEIIPELASKNLKNDYRILSQTLCELCDDRNESSNLFLKKNKRLRKCVEVDINNADSSMTRKYRNCIAHLTVVRELKEYIGDIRTVDSYFSIYHYVMQRCITKRGDDTKQEEKIKYEDDLLKNHGYTKDFVKALNSPFGYNIPRFKNLSIEQLFDRNEYLTEK

SEQ ID NO: 110 - protein, 531 aa, Artificial Sequence
  gut_metagenome_P11E90k2120140920_c43000123
FRFKDKQYDSVRSKMYKLMDFLLFCNYYRNDVVAGEALVRKLRFSMTDDEKEGIYADEAAKLWGKFRNDFENIADHMNGDVIKELGKADMDFDEKILDSEKKNASDLLYFSKMIYMLTYFLDGKEINDLLTTLISKFDNIKEFLKIMKSSAVDVECELTAGYKLFNDSQRITNELFIVKNIASMRKPAASARLTMFRDALTILGIDDKITDDRISEILKLKEKGKGIHGLRNFITNNVIESSRFVYLIKYANAQKIREVAKNEKVVMFVLGGIPDTQIERYYKSCVEFPDMNSSLEAKRSELARMIKNISFDDFKNVKQQAKGRENVAKERAKAVIGLYLTVMYLLVKNLVNVNARYVIAIHCLERDFGLYKEIIPELASKNLKNDYRILSQTLCELCDKSPNLFLKKNERLRKCVEVDINNADSSMTRKYRNCIAHLTVVRELKEYIGDIRTVDSYFSIYHYVMQRCITKRENDTKQEDKIKYEDDLLKNHGYTKDFVKALNSPFGYNIPRFKNLSIEQLFDRNEYLTEK

SEQ ID NO: 111 - protein, 925 aa, Artificial Sequence
  M6_gut_metagenome_P13E90k2120140920_c7000009
MAKKNKMKPRELREAQKKARQLKAAEIKNNAVPAIAAMPAAEAAAPAVEKKKSSVKAAGMKSILVSENKMYITSFGKGNSAVLEYEVDKVDNNNYNKTQLSSKDNSNIELGDVNEVNITFSSKRGNESGVEINTSNPTHRSGESSPVRWDMLGLKSELEKRFFGKTFDDNIHIQLIYNILDIEKILAVYVTNIVYALNNMLGIKGSESYDDFMGYLSARNTYEVFTHPDKSNLSDKVKGNIKKSLSKFNDLLKTKRLGYFGLEEPKTKDTRVSQAYKKRVYHMLAIVGQIRQCVFHDKSGAKRFDLYSFINNIDPEYRDTLDYLVEERLKSINKDFIEGNKVNISLLIDMMKGYEADDIIRLYYDFIVLKSQKNLGFSIKKLREKMLEEYGYRFKDKQYDSVRSKMYKLMDFLLFCNYYRNDVVAGEALVRKLRFSMTDDEKEGIYADEASKLWGKFRNDFENIADHMNGDVIKELGKADMDFDEKILDSEKKNASDLLYFSKMIYMLTYFLDGKEINDLLTTLISKFDNIKEFLKIMKSSAVDVECELTAGYKLFNDSQRITNELFIVKNIASMRKPAASAKLTMFRDALTILGIDDKITDDRISEILKLKEKGKGIHGLRNFITNNVIESSRFVYLIKYANAQKIREVAKNEKVVMFVLGGIPDTQIERYYKSCVEFPDMNSSLEAKRSELARMIKNIRFDDFKNVKQQAKGRENVAKERAKAVIGLYLTVMYLLVKNLVNVNARYVIAIHCLERDFGLYKEIIPELASKNLKNDYRILSQTLCELCDDRDESPNLFLKKNKRLRKCVEVDINNADSSMTRKYRNCIAHLTVVRELKEYIGDIRTVDSYFSIYHYVMQRCITKREDDTKQEEKIKYEDDLLKNHGYTKDFVKALNSPFGYNIPRFKNLSIEQLFDRNEYLTEK

SEQ ID NO: 112 - protein, 921 aa, Artificial Sequence
  M19_gut_metagenome_P17E90k2120140920
MAKKNKMKPRERREAQKKARQLKAAEINNNAVPAIAAMHAAEVIAPAAEKKKSSVKAAGMKSILVSENKMYITSFGKGNSAVLEYEVDNNDYNQTQLSSKDNSNIELCGVTKVNITFSSKHGFESGVEINTSNPTHRSGESSPVRGDMLGLKSELEKRFFGKTFDDNIHIQLIYNILDIEKILAVYVTNIVYALNNMLGEGDESNYDFMGYLSTFNTYKVFTNPNGSTLSDDKKENIRKSLSKFNALLKTKRLGYFGLEEPKTKDTRASEAYKKRVYHMLAIVGQIRQCVFHDKSGAKRFDLYSFINNIYPEYRDTLDYLVEERLKSINKDFIQGNKVNISLLIDMMKGYEADDIIRLYYDFIVLKSQKNLGFSIKKLREKMLDEYGFRFKDKQYDSVRSKMYKLMDFLLFCNYYRNDVVAGEALVRKLRFSMTDDEKEGIYADEAAKLWGKFRNDFENIADHMNGDVIKELGKADMDFDEKILDSEKKNASDLLYFSKMIYMLTYFLDGKEINDLLTTLISKFDNIKEFLKIMKSSAVDVECELTAGYKLFNDSQRITNELFIVKNIASMRKPAASAKLTMFRDALTILGIDDKITDDRISEILKLKEKGKGIHGLRNFITNNVIESSRFVYLIKYANAQKIREVAKNEKVVMFVLGGIPDTQIERYYKSCVEFPDMNSSLEAKRSELARMIKNISFDDFKNVKQQAKGRENVAKERAKAVIGLYLTVMYLLVKNLVNVNARYVIAIHCLERDFGLYKEIIPELASKNLKNDYRILSQTLCELCDDRDESPNLFLKKNKRLRKCVEVDINNADSSMTRKYRNCIAHLTVVRELKKYIGDIRTVDSYFSIYHYVMQRCITKREDDTKQEEKIKYEDDLLKNHGYTKDFVKALNSPFGYNIPRFKNLSIEQLFDRNEYLTEK

SEQ ID NO: 113 - protein, 234 aa, Artificial Sequence
  gut_metagenome_P17E0k2120140920,_c87000043
MYFSKMIYMLTYFLDGKEINDLLTTLISKFDNIKEFLKIMKSSAVDVECELTAGYKLFNDSQRITNELFIVKNIASMRKPAASAKLTMFRDALTILGIDDKITDDRISEILKLKEKGKGIHGLRNFITNNVIESSRFVYLIKYANAQKIREVAKNEKVVMFVLGGIPDTQIERYYKSCVEFPDMNSSLEAKRSELARMIKNISFDDFKNVKQQAKGRENVAKERAKAVIGLYLT

SEQ ID NO: 114 - DNA, 2859 bp, Artificial Sequence
  Human codon-optimized Eubacterium siraeum nCas1
ggcaagaagatccatgccagggacctcagggagcaaagaaagaccgataggacagaaaagttcgccgatcagaacaagaagagggaggctgagagagctgtgcccaaaaaagacgccgccgtctccgtgaagagcgtgtccagcgtcagcagcaagaaggacaacgtcaccaagagcatggccaaggccgccggagtgaagtccgtctttgctgtgggaaacaccgtgtacatgacctccttcggcaggggcaacgatgccgtgctggagcagaaaatcgtggacacctcccatgagcccctgaatatcgacgatcccgcctatcaactcaacgtggtgaccatgaatggatacagcgtcacaggccatagaggagagacagtgtccgccgtgacagataatcccctgaggagattcaacggcaggaagaaggacgaacccgagcagagcgtccctacagacatgctctgcctgaagcccaccctcgagaaaaaattttttggaaaggagtttgatgacaacattcatattcagctgatctataatatcctggatatcgagaaaatcctggccgtgtactccaccaacgccatctacgctctcaacaacatgtccgccgacgaaaacatcgagaactccgacttcttcatgaaaagaacaacagacgagacctttgacgacttcgagaagaagaaggagagcaccaacagcagagagaaagctgactttgacgcctttgaaaagttcatcggaaactataggctggcctatttcgctgacgctttctacgtgaataaaaagaaccccaagggaaaggccaagaatgtcctgagggaggacaaggagctctacagcgtgctgacactgatcggaaagctgagacactggtgtgtccacagcgaggaaggaagggctgaattctggctgtacaagctggacgagctcaaagacgatttcaagaacgtcctggatgtggtgtataacagacccgtggaggagatcaacaacaggttcatcgaaaataacaaagtcaacatccagatcctgggctccgtgtataagaacaccgacatcgccgagctggtgaggtcctactatgagttcctgatcaccaaaaaatacaagaatatgggcttttccatcaagaagctcagggagagcatgctggagggcaagggctacgctgataaggagtacgatagcgtgagaaataagctgtaccagatgaccgatttcatcctctacaccggctacatcaacgaagatagcgatagggctgacgacctggtgaacacactgaggagctccctcaaggaggacgacaaaacaaccgtctactgcaaggaggccgattacctgtggaaaaagtacagggaaagcattagagaagtcgccgatgccctggatggcgacaacattaagaagctgtccaagagcaatattgagattcaggaggataagctgagaaaatgtttcattagctatgctgatagcgtgagcgagtttaccaagctgatctacctcctcacaagattcctgagcggcaaggagatcaatgacctggtgaccaccctgatcaacaagttcgataatattagatcctttctggagattatggatgaactgggcctggacaggacatttaccgccgagtacagcttcttcgaaggctccacaaagtacctggccgagctcgtggagctgaatagctttgtgaagtcctgctccttcgacatcaatgccaagaggaccatgtacagggacgccctggatatcctgggcatcgagtccgacaagaccgaggaggatattgagaagatgattgataatatcctgcagatcgacgccaacggagataaaaagctgaagaaaaacaacggactgagaaacttcatcgcttccaacgtcatcgacagcaatagattcaaatacctggtcaggtacggcaaccccaagaagattagagagacagccaagtgcaagcccgctgtgaggttcgtgctgaacgaaattcccgacgcccagatcgaaaggtactatgaggcttgctgccccaagaacaccgccctctgcagcgccaataagagaagggagaagctggccgacatgatcgctgagatcaaattcgagaattttagcgatgccggcaattaccagaaggctaacgtcacatccaggaccagcgaggccgagatcaagagaaaaaaccaggccattattaggctctatctgacagtgatgtatattatgctgaaaaacctggtgaacgtgaatgccaggtacgtcattgccttccactgcgtggaaagggacaccaagctgtacgccgaaagcggcctggaagtgggcaacatcgaaaagaacaaaacaaacctcaccatggccgtgatgggagtgaaactcgaaaacggaattatcaagacagagttcgataagagcttcgccgagaacgccgctaacagatacctgaggaacgccaggtggtataaactgatcctggacaacctgaaaaaatccgagagagccgtggtgaatgagttcagaaataccgtgtgccacctgaatgccatcaggaacatcaatatcaacatcaaggaaattaaggaggtggagaattatttcgctctgtaccactacctgatccagaagcacctggagaacaggttcgccgataagaaggtggaaagggatacaggcgatttcatcagcaaactggaggagcacaagacctattgcaaagactttgtgaaggcttactgcaccccctttggctacaacctggtgagatataagaatctcaccattgacggcctcttcgacaagaactaccctggcaaggatgactccgatgagcagaag

SEQ ID NO: 115 - DNA, 2862 bp, Artificial Sequence
  Human codon-optimized Eubacterium siraeum nCas1 HEPN-/-
ggcaagaagatccatgccagggacctcagggagcaaagaaagaccgataggacagaaaagttcgccgatcagaacaagaagagggaggctgagagagctgtgcccaaaaaagacgccgccgtctccgtgaagagcgtgtccagcgtcagcagcaagaaggacaacgtcaccaagagcatggccaaggccgccggagtgaagtccgtctttgctgtgggaaacaccgtgtacatgacctccttcggcaggggcaacgatgccgtgctggagcagaaaatcgtggacacctcccatgagcccctgaatatcgacgatcccgcctatcaactcaacgtggtgaccatgaatggatacagcgtcacaggccatagaggagagacagtgtccgccgtgacagataatcccctgaggagattcaacggcaggaagaaggacgaacccgagcagagcgtccctacagacatgctctgcctgaagcccaccctcgagaaaaaattttttggaaaggagtttgatgacaacattcatattcagctgatctataatatcctggatatcgagaaaatcctggccgtgtactccaccaacgccatctacgctctcaacaacatgtccgccgacgaaaacatcgagaactccgacttcttcatgaaaagaacaacagacgagacctttgacgacttcgagaagaagaaggagagcaccaacagcagagagaaagctgactttgacgcctttgaaaagttcatcggaaactataggctggcctatttcgctgacgctttctacgtgaataaaaagaaccccaagggaaaggccaagaatgtcctgagggaggacaaggagctctacagcgtgctgacactgatcggaaagctggcacactggtgtgtcgccagcgaggaaggaagggctgaattctggctgtacaagctggacgagctcaaagacgatttcaagaacgtcctggatgtggtgtataacagacccgtggaggagatcaacaacaggttcatcgaaaataacaaagtcaacatccagatcctgggctccgtgtataagaacaccgacatcgccgagctggtgaggtcctactatgagttcctgatcaccaaaaaatacaagaatatgggcttttccatcaagaagctcagggagagcatgctggagggcaagggctacgctgataaggagtacgatagcgtgagaaataagctgtaccagatgaccgatttcatcctctacaccggctacatcaacgaagatagcgatagggctgacgacctggtgaacacactgaggagctccctcaaggaggacgacaaaacaaccgtctactgcaaggaggccgattacctgtggaaaaagtacagggaaagcattagagaagtcgccgatgccctggatggcgacaacattaagaagctgtccaagagcaatattgagattcaggaggataagctgagaaaatgtttcattagctatgctgatagcgtgagcgagtttaccaagctgatctacctcctcacaagattcctgagcggcaaggagatcaatgacctggtgaccaccctgatcaacaagttcgataatattagatcctttctggagattatggatgaactgggcctggacaggacatttaccgccgagtacagcttcttcgaaggctccacaaagtacctggccgagctcgtggagctgaatagctttgtgaagtcctgctccttcgacatcaatgccaagaggaccatgtacagggacgccctggatatcctgggcatcgagtccgacaagaccgaggaggatattgagaagatgattgataatatcctgcagatcgacgccaacggagataaaaagctgaagaaaaacaacggactgagaaacttcatcgcttccaacgtcatcgacagcaatagattcaaatacctggtcaggtacggcaaccccaagaagattagagagacagccaagtgcaagcccgctgtgaggttcgtgctgaacgaaattcccgacgcccagatcgaaaggtactatgaggcttgctgccccaagaacaccgccctctgcagcgccaataagagaagggagaagctggccgacatgatcgctgagatcaaattcgagaattttagcgatgccggcaattaccagaaggctaacgtcacatccaggaccagcgaggccgagatcaagagaaaaaaccaggccattattaggctctatctgacagtgatgtatattatgctgaaaaacctggtgaacgtgaatgccaggtacgtcattgccttccactgcgtggaaagggacaccaagctgtacgccgaaagcggcctggaagtgggcaacatcgaaaagaacaaaacaaacctcaccatggccgtgatgggagtgaaactcgaaaacggaattatcaagacagagttcgataagagcttcgccgagaacgccgctaacagatacctgaggaacgccaggtggtataaactgatcctggacaacctgaaaaaatccgagagagccgtggtgaatgagttcgcaaataccgtgtgcgccctgaatgccatcaggaacatcaatatcaacatcaaggaaattaaggaggtggagaattatttcgctctgtaccactacctgatccagaagcacctggagaacaggttcgccgataagaaggtggaaagggatacaggcgatttcatcagcaaactggaggagcacaagacctattgcaaagactttgtgaaggcttactgcaccccctttggctacaacctggtgagatataagaatctcaccattgacggcctcttcgacaagaactaccctggcaaggatgactccgatgagcagaagtga

SEQ ID NO: 116 - DNA, 2892 bp, Artificial Sequence
  Human codon-optimized Eubacterium siraeum nCas1 with N-terminal NLS
agccccaagaagaagagaaaggtggaggccagcggcaagaagatccatgccagggacctcagggagcaaagaaagaccgataggacagaaaagttcgccgatcagaacaagaagagggaggctgagagagctgtgcccaaaaaagacgccgccgtctccgtgaagagcgtgtccagcgtcagcagcaagaaggacaacgtcaccaagagcatggccaaggccgccggagtgaagtccgtctttgctgtgggaaacaccgtgtacatgacctccttcggcaggggcaacgatgccgtgctggagcagaaaatcgtggacacctcccatgagcccctgaatatcgacgatcccgcctatcaactcaacgtggtgaccatgaatggatacagcgtcacaggccatagaggagagacagtgtccgccgtgacagataatcccctgaggagattcaacggcaggaagaaggacgaacccgagcagagcgtccctacagacatgctctgcctgaagcccaccctcgagaaaaaattttttggaaaggagtttgatgacaacattcatattcagctgatctataatatcctggatatcgagaaaatcctggccgtgtactccaccaacgccatctacgctctcaacaacatgtccgccgacgaaaacatcgagaactccgacttcttcatgaaaagaacaacagacgagacctttgacgacttcgagaagaagaaggagagcaccaacagcagagagaaagctgactttgacgcctttgaaaagttcatcggaaactataggctggcctatttcgctgacgctttctacgtgaataaaaagaaccccaagggaaaggccaagaatgtcctgagggaggacaaggagctctacagcgtgctgacactgatcggaaagctgagacactggtgtgtccacagcgaggaaggaagggctgaattctggctgtacaagctggacgagctcaaagacgatttcaagaacgtcctggatgtggtgtataacagacccgtggaggagatcaacaacaggttcatcgaaaataacaaagtcaacatccagatcctgggctccgtgtataagaacaccgacatcgccgagctggtgaggtcctactatgagttcctgatcaccaaaaaatacaagaatatgggcttttccatcaagaagctcagggagagcatgctggagggcaagggctacgctgataaggagtacgatagcgtgagaaataagctgtaccagatgaccgatttcatcctctacaccggctacatcaacgaagatagcgatagggctgacgacctggtgaacacactgaggagctccctcaaggaggacgacaaaacaaccgtctactgcaaggaggccgattacctgtggaaaaagtacagggaaagcattagagaagtcgccgatgccctggatggcgacaacattaagaagctgtccaagagcaatattgagattcaggaggataagctgagaaaatgtttcattagctatgctgatagcgtgagcgagtttaccaagctgatctacctcctcacaagattcctgagcggcaaggagatcaatgacctggtgaccaccctgatcaacaagttcgataatattagatcctttctggagattatggatgaactgggcctggacaggacatttaccgccgagtacagcttcttcgaaggctccacaaagtacctggccgagctcgtggagctgaatagctttgtgaagtcctgctccttcgacatcaatgccaagaggaccatgtacagggacgccctggatatcctgggcatcgagtccgacaagaccgaggaggatattgagaagatgattgataatatcctgcagatcgacgccaacggagataaaaagctgaagaaaaacaacggactgagaaacttcatcgcttccaacgtcatcgacagcaatagattcaaatacctggtcaggtacggcaaccccaagaagattagagagacagccaagtgcaagcccgctgtgaggttcgtgctgaacgaaattcccgacgcccagatcgaaaggtactatgaggcttgctgccccaagaacaccgccctctgcagcgccaataagagaagggagaagctggccgacatgatcgctgagatcaaattcgagaattttagcgatgccggcaattaccagaaggctaacgtcacatccaggaccagcgaggccgagatcaagagaaaaaaccaggccattattaggctctatctgacagtgatgtatattatgctgaaaaacctggtgaacgtgaatgccaggtacgtcattgccttccactgcgtggaaagggacaccaagctgtacgccgaaagcggcctggaagtgggcaacatcgaaaagaacaaaacaaacctcaccatggccgtgatgggagtgaaactcgaaaacggaattatcaagacagagttcgataagagcttcgccgagaacgccgctaacagatacctgaggaacgccaggtggtataaactgatcctggacaacctgaaaaaatccgagagagccgtggtgaatgagttcagaaataccgtgtgccacctgaatgccatcaggaacatcaatatcaacatcaaggaaattaaggaggtggagaattatttcgctctgtaccactacctgatccagaagcacctggagaacaggttcgccgataagaaggtggaaagggatacaggcgatttcatcagcaaactggaggagcacaagacctattgcaaagactttgtgaaggcttactgcaccccctttggctacaacctggtgagatataagaatctcaccattgacggcctcttcgacaagaactaccctggcaaggatgactccgatgagcagaag

SEQ ID NO: 117 - DNA, 2931 bp, Artificial Sequence
  Human codon-optimized Eubacterium siraeum nCas1 with N- and C-terminal NLS tags
agccccaagaagaagagaaaggtggaggccagcggcaagaagatccatgccagggacctcagggagcaaagaaagaccgataggacagaaaagttcgccgatcagaacaagaagagggaggctgagagagctgtgcccaaaaaagacgccgccgtctccgtgaagagcgtgtccagcgtcagcagcaagaaggacaacgtcaccaagagcatggccaaggccgccggagtgaagtccgtctttgctgtgggaaacaccgtgtacatgacctccttcggcaggggcaacgatgccgtgctggagcagaaaatcgtggacacctcccatgagcccctgaatatcgacgatcccgcctatcaactcaacgtggtgaccatgaatggatacagcgtcacaggccatagaggagagacagtgtccgccgtgacagataatcccctgaggagattcaacggcaggaagaaggacgaacccgagcagagcgtccctacagacatgctctgcctgaagcccaccctcgagaaaaaattttttggaaaggagtttgatgacaacattcatattcagctgatctataatatcctggatatcgagaaaatcctggccgtgtactccaccaacgccatctacgctctcaacaacatgtccgccgacgaaaacatcgagaactccgacttcttcatgaaaagaacaacagacgagacctttgacgacttcgagaagaagaaggagagcaccaacagcagagagaaagctgactttgacgcctttgaaaagttcatcggaaactataggctggcctatttcgctgacgctttctacgtgaataaaaagaaccccaagggaaaggccaagaatgtcctgagggaggacaaggagctctacagcgtgctgacactgatcggaaagctgagacactggtgtgtccacagcgaggaaggaagggctgaattctggctgtacaagctggacgagctcaaagacgatttcaagaacgtcctggatgtggtgtataacagacccgtggaggagatcaacaacaggttcatcgaaaataacaaagtcaacatccagatcctgggctccgtgtataagaacaccgacatcgccgagctggtgaggtcctactatgagttcctgatcaccaaaaaatacaagaatatgggcttttccatcaagaagctcagggagagcatgctggagggcaagggctacgctgataaggagtacgatagcgtgagaaataagctgtaccagatgaccgatttcatcctctacaccggctacatcaacgaagatagcgatagggctgacgacctggtgaacacactgaggagctccctcaaggaggacgacaaaacaaccgtctactgcaaggaggccgattacctgtggaaaaagtacagggaaagcattagagaagtcgccgatgccctggatggcgacaacattaagaagctgtccaagagcaatattgagattcaggaggataagctgagaaaatgtttcattagctatgctgatagcgtgagcgagtttaccaagctgatctacctcctcacaagattcctgagcggcaaggagatcaatgacctggtgaccaccctgatcaacaagttcgataatattagatcctttctggagattatggatgaactgggcctggacaggacatttaccgccgagtacagcttcttcgaaggctccacaaagtacctggccgagctcgtggagctgaatagctttgtgaagtcctgctccttcgacatcaatgccaagaggaccatgtacagggacgccctggatatcctgggcatcgagtccgacaagaccgaggaggatattgagaagatgattgataatatcctgcagatcgacgccaacggagataaaaagctgaagaaaaacaacggactgagaaacttcatcgcttccaacgtcatcgacagcaatagattcaaatacctggtcaggtacggcaaccccaagaagattagagagacagccaagtgcaagcccgctgtgaggttcgtgctgaacgaaattcccgacgcccagatcgaaaggtactatgaggcttgctgccccaagaacaccgccctctgcagcgccaataagagaagggagaagctggccgacatgatcgctgagatcaaattcgagaattttagcgatgccggcaattaccagaaggctaacgtcacatccaggaccagcgaggccgagatcaagagaaaaaaccaggccattattaggctctatctgacagtgatgtatattatgctgaaaaacctggtgaacgtgaatgccaggtacgtcattgccttccactgcgtggaaagggacaccaagctgtacgccgaaagcggcctggaagtgggcaacatcgaaaagaacaaaacaaacctcaccatggccgtgatgggagtgaaactcgaaaacggaattatcaagacagagttcgataagagcttcgccgagaacgccgctaacagatacctgaggaacgccaggtggtataaactgatcctggacaacctgaaaaaatccgagagagccgtggtgaatgagttcagaaataccgtgtgccacctgaatgccatcaggaacatcaatatcaacatcaaggaaattaaggaggtggagaattatttcgctctgtaccactacctgatccagaagcacctggagaacaggttcgccgataagaaggtggaaagggatacaggcgatttcatcagcaaactggaggagcacaagacctattgcaaagactttgtgaaggcttactgcaccccctttggctacaacctggtgagatataagaatctcaccattgacggcctcttcgacaagaactaccctggcaaggatgactccgatgagcagaagggatccggacctaagaaaaagaggaaggtggcggccgct

SEQ ID NO: 118 - DNA, 2754 bp, Artificial Sequence
  Human codon-optimized uncultured Ruminococcus sp. nCas1
gccaagaagaacaagatgaaacccagggagctgagagaggctcagaagaaggctaggcaactgaaagccgccgagatcaataacaatgccgcccctgccatcgccgctatgcccgctgccgaagtcatcgctcccgccgccgaaaagaagaagagctccgtgaaagccgctggaatgaagtccattctggtgtccgagaacaaaatgtatatcacctccttcggcaaaggcaattccgctgtgctggagtatgaggtggacaacaacgactacaatcagacccagctcagcagcaaggataactccaacatccagctgggcggcgtgaatgaagtgaatatcaccttcagcagcaagcacggatttgagtccggagtcgagattaacacaagcaaccctacccacaggtccggagaaagcagccctgtcagaggagacatgctgggactgaaaagcgagctggagaagagattctttggaaagacctttgatgacaatatccacatccagctcatttacaacatcctggatatcgagaaaatcctggccgtgtatgtgaccaacatcgtgtacgctctgaacaacatgctcggcgtcaagggcagcgagtcccacgacgactttattggctatctgtccaccaacaatatttacgatgtcttcattgaccccgacaacagcagcctctccgacgacaaaaaagccaacgtcaggaagagcctcagcaaattcaacgccctgctgaagaccaagaggctcggatactttggcctggaggaacccaagaccaaggacaacagagtgagccaggcctataagaaaagggtgtaccacatgctggccatcgtgggccagatcagacagtgcgtgttccatgacaagtccggcgccaagagattcgacctgtactccttcattaacaacatcgaccctgagtacagggatacactggattacctcgtggaggagaggctgaagagcatcaacaaagactttattgaggacaacaaagtcaacatcagcctgctgatcgatatgatgaagggctacgaagctgacgacatcatcaggctgtactatgatttcattgtcctgaagagccagaagaacctgggattctccattaagaaactgagagaaaagatgctcgacgagtacggcttcaggttcaaggacaagcagtatgacagcgtgagatccaagatgtacaagctgatggattttctcctgttttgcaactattacaggaacgacatcgccgccggcgaatccctggtcaggaaactgagattcagcatgaccgacgacgagaaggaaggcatctacgccgacgaagccgctaagctgtggggaaaatttagaaatgacttcgagaacatcgctgaccacatgaacggcgatgtgatcaaggagctcggcaaggctgacatggatttcgacgagaagatcctggattccgagaagaagaatgccagcgatctgctgtacttcagcaagatgatttacatgctcacatattttctcgatggcaaggagatcaacgatctcctgaccacactgatcagcaagttcgacaacattaaagagttcctcaaaattatgaaatccagcgccgtggatgtcgagtgcgaactcaccgccggctacaagctcttcaacgacagccagaggatcaccaatgagctgttcattgtgaaaaatatcgctagcatgaggaaacccgccgcctccgctaaactgacaatgtttagagatgccctcaccatcctgggcatcgacgataagatcacagacgacagaattagcggaatcctgaagctcaaggaaaagggcaagggaatccatggcctcagaaatttcattaccaataacgtgatcgaaagcagcaggttcgtgtatctgatcaagtacgccaatgcccaaaagatcagggaggtggccaagaacgaaaaggtggtgatgttcgtgctgggcggcattcctgacacacagatcgaaaggtactacaagagctgtgtggagttccccgatatgaactccagcctgggcgtgaagagatccgaactggctaggatgatcaagaatattagcttcgacgacttcaagaacgtgaagcaacaggccaaaggaagggagaacgtcgccaaagagagagccaaggccgtgatcggactctacctgaccgtcatgtacctcctcgtgaagaacctggtgaacgtgaacgctagatacgtcatcgccatccattgcctcgagagggacttcggactgtacaaggagatcattcccgagctggccagcaaaaatctcaagaacgattacagaatcctgagccaaaccctgtgcgagctgtgtgacaagtcccccaacctgtttctgaagaagaatgaaaggctgagaaagtgcgtcgaagtcgacatcaacaacgctgacagctccatgaccaggaaatacaggaactgtatcgcccatctgaccgtggtgagggaactcaaggagtacatcggagatatctgcaccgtggactcctacttcagcatttatcactacgtgatgcagaggtgcattaccaagagagaaaatgacacaaagcaggaggagaagattaagtacgaggacgatctgctgaaaaaccacggatacaccaaggatttcgtcaaggccctcaatagccccttcggctacaatatccctaggtttaaaaacctgagcatcgagcagctgtttgacagaaatgaatacctgacagagaag

SEQ ID NO: 119 - DNA, 2757 bp, Artificial Sequence
  Human codon-optimized uncultured Ruminococcus sp. nCas1 HEPN-/-
atggccaagaagaacaagatgaaacccagggagctgagagaggctcagaagaaggctaggcaactgaaagccgccgagatcaataacaatgccgcccctgccatcgccgctatgcccgctgccgaagtcatcgctcccgccgccgaaaagaagaagagctccgtgaaagccgctggaatgaagtccattctggtgtccgagaacaaaatgtatatcacctccttcggcaaaggcaattccgctgtgctggagtatgaggtggacaacaacgactacaatcagacccagctcagcagcaaggataactccaacatccagctgggcggcgtgaatgaagtgaatatcaccttcagcagcaagcacggatttgagtccggagtcgagattaacacaagcaaccctacccacaggtccggagaaagcagccctgtcagaggagacatgctgggactgaaaagcgagctggagaagagattctttggaaagacctttgatgacaatatccacatccagctcatttacaacatcctggatatcgagaaaatcctggccgtgtatgtgaccaacatcgtgtacgctctgaacaacatgctcggcgtcaagggcagcgagtcccacgacgactttattggctatctgtccaccaacaatatttacgatgtcttcattgaccccgacaacagcagcctctccgacgacaaaaaagccaacgtcaggaagagcctcagcaaattcaacgccctgctgaagaccaagaggctcggatactttggcctggaggaacccaagaccaaggacaacagagtgagccaggcctataagaaaagggtgtaccacatgctggccatcgtgggccagatcgcacagtgcgtgttcgctgacaagtccggcgccaagagattcgacctgtactccttcattaacaacatcgaccctgagtacagggatacactggattacctcgtggaggagaggctgaagagcatcaacaaagactttattgaggacaacaaagtcaacatcagcctgctgatcgatatgatgaagggctacgaagctgacgacatcatcaggctgtactatgatttcattgtcctgaagagccagaagaacctgggattctccattaagaaactgagagaaaagatgctcgacgagtacggcttcaggttcaaggacaagcagtatgacagcgtgagatccaagatgtacaagctgatggattttctcctgttttgcaactattacaggaacgacatcgccgccggcgaatccctggtcaggaaactgagattcagcatgaccgacgacgagaaggaaggcatctacgccgacgaagccgctaagctgtggggaaaatttagaaatgacttcgagaacatcgctgaccacatgaacggcgatgtgatcaaggagctcggcaaggctgacatggatttcgacgagaagatcctggattccgagaagaagaatgccagcgatctgctgtacttcagcaagatgatttacatgctcacatattttctcgatggcaaggagatcaacgatctcctgaccacactgatcagcaagttcgacaacattaaagagttcctcaaaattatgaaatccagcgccgtggatgtcgagtgcgaactcaccgccggctacaagctcttcaacgacagccagaggatcaccaatgagctgttcattgtgaaaaatatcgctagcatgaggaaacccgccgcctccgctaaactgacaatgtttagagatgccctcaccatcctgggcatcgacgataagatcacagacgacagaattagcggaatcctgaagctcaaggaaaagggcaagggaatccatggcctcagaaatttcattaccaataacgtgatcgaaagcagcaggttcgtgtatctgatcaagtacgccaatgcccaaaagatcagggaggtggccaagaacgaaaaggtggtgatgttcgtgctgggcggcattcctgacacacagatcgaaaggtactacaagagctgtgtggagttccccgatatgaactccagcctgggcgtgaagagatccgaactggctaggatgatcaagaatattagcttcgacgacttcaagaacgtgaagcaacaggccaaaggaagggagaacgtcgccaaagagagagccaaggccgtgatcggactctacctgaccgtcatgtacctcctcgtgaagaacctggtgaacgtgaacgctagatacgtcatcgccatccattgcctcgagagggacttcggactgtacaaggagatcattcccgagctggccagcaaaaatctcaagaacgattacagaatcctgagccaaaccctgtgcgagctgtgtgacaagtcccccaacctgtttctgaagaagaatgaaaggctgagaaagtgcgtcgaagtcgacatcaacaacgctgacagctccatgaccaggaaatacgcgaactgtatcgccgctctgaccgtggtgagggaactcaaggagtacatcggagatatctgcaccgtggactcctacttcagcatttatcactacgtgatgcagaggtgcattaccaagagagaaaatgacacaaagcaggaggagaagattaagtacgaggacgatctgctgaaaaaccacggatacaccaaggatttcgtcaaggccctcaatagccccttcggctacaatatccctaggtttaaaaacctgagcatcgagcagctgtttgacagaaatgaatacctgacagagaag

SEQ ID NO: 120 - DNA, 2787 bp, Artificial Sequence
  Human codon-optimized uncultured Ruminococcus sp. nCas1 with N-terminal NLS
agccccaagaagaagagaaaggtggaggccagcgccaagaagaacaagatgaaacccagggagctgagagaggctcagaagaaggctaggcaactgaaagccgccgagatcaataacaatgccgcccctgccatcgccgctatgcccgctgccgaagtcatcgctcccgccgccgaaaagaagaagagctccgtgaaagccgctggaatgaagtccattctggtgtccgagaacaaaatgtatatcacctccttcggcaaaggcaattccgctgtgctggagtatgaggtggacaacaacgactacaatcagacccagctcagcagcaaggataactccaacatccagctgggcggcgtgaatgaagtgaatatcaccttcagcagcaagcacggatttgagtccggagtcgagattaacacaagcaaccctacccacaggtccggagaaagcagccctgtcagaggagacatgctgggactgaaaagcgagctggagaagagattctttggaaagacctttgatgacaatatccacatccagctcatttacaacatcctggatatcgagaaaatcctggccgtgtatgtgaccaacatcgtgtacgctctgaacaacatgctcggcgtcaagggcagcgagtcccacgacgactttattggctatctgtccaccaacaatatttacgatgtcttcattgaccccgacaacagcagcctctccgacgacaaaaaagccaacgtcaggaagagcctcagcaaattcaacgccctgctgaagaccaagaggctcggatactttggcctggaggaacccaagaccaaggacaacagagtgagccaggcctataagaaaagggtgtaccacatgctggccatcgtgggccagatcagacagtgcgtgttccatgacaagtccggcgccaagagattcgacctgtactccttcattaacaacatcgaccctgagtacagggatacactggattacctcgtggaggagaggctgaagagcatcaacaaagactttattgaggacaacaaagtcaacatcagcctgctgatcgatatgatgaagggctacgaagctgacgacatcatcaggctgtactatgatttcattgtcctgaagagccagaagaacctgggattctccattaagaaactgagagaaaagatgctcgacgagtacggcttcaggttcaaggacaagcagtatgacagcgtgagatccaagatgtacaagctgatggattttctcctgttttgcaactattacaggaacgacatcgccgccggcgaatccctggtcaggaaactgagattcagcatgaccgacgacgagaaggaaggcatctacgccgacgaagccgctaagctgtggggaaaatttagaaatgacttcgagaacatcgctgaccacatgaacggcgatgtgatcaaggagctcggcaaggctgacatggatttcgacgagaagatcctggattccgagaagaagaatgccagcgatctgctgtacttcagcaagatgatttacatgctcacatattttctcgatggcaaggagatcaacgatctcctgaccacactgatcagcaagttcgacaacattaaagagttcctcaaaattatgaaatccagcgccgtggatgtcgagtgcgaactcaccgccggctacaagctcttcaacgacagccagaggatcaccaatgagctgttcattgtgaaaaatatcgctagcatgaggaaacccgccgcctccgctaaactgacaatgtttagagatgccctcaccatcctgggcatcgacgataagatcacagacgacagaattagcggaatcctgaagctcaaggaaaagggcaagggaatccatggcctcagaaatttcattaccaataacgtgatcgaaagcagcaggttcgtgtatctgatcaagtacgccaatgcccaaaagatcagggaggtggccaagaacgaaaaggtggtgatgttcgtgctgggcggcattcctgacacacagatcgaaaggtactacaagagctgtgtggagttccccgatatgaactccagcctgggcgtgaagagatccgaactggctaggatgatcaagaatattagcttcgacgacttcaagaacgtgaagcaacaggccaaaggaagggagaacgtcgccaaagagagagccaaggccgtgatcggactctacctgaccgtcatgtacctcctcgtgaagaacctggtgaacgtgaacgctagatacgtcatcgccatccattgcctcgagagggacttcggactgtacaaggagatcattcccgagctggccagcaaaaatctcaagaacgattacagaatcctgagccaaaccctgtgcgagctgtgtgacaagtcccccaacctgtttctgaagaagaatgaaaggctgagaaagtgcgtcgaagtcgacatcaacaacgctgacagctccatgaccaggaaatacaggaactgtatcgcccatctgaccgtggtgagggaactcaaggagtacatcggagatatctgcaccgtggactcctacttcagcatttatcactacgtgatgcagaggtgcattaccaagagagaaaatgacacaaagcaggaggagaagattaagtacgaggacgatctgctgaaaaaccacggatacaccaaggatttcgtcaaggccctcaatagccccttcggctacaatatccctaggtttaaaaacctgagcatcgagcagctgtttgacagaaatgaatacctgacagagaag

SEQ ID NO: 121 - DNA, 2826 bp, Artificial Sequence
  Human codon-optimized uncultured Ruminococcus sp. nCas1 with N- and C-terminal NLS tags
agccccaagaagaagagaaaggtggaggccagcgccaagaagaacaagatgaaacccagggagctgagagaggctcagaagaaggctaggcaactgaaagccgccgagatcaataacaatgccgcccctgccatcgccgctatgcccgctgccgaagtcatcgctcccgccgccgaaaagaagaagagctccgtgaaagccgctggaatgaagtccattctggtgtccgagaacaaaatgtatatcacctccttcggcaaaggcaattccgctgtgctggagtatgaggtggacaacaacgactacaatcagacccagctcagcagcaaggataactccaacatccagctgggcggcgtgaatgaagtgaatatcaccttcagcagcaagcacggatttgagtccggagtcgagattaacacaagcaaccctacccacaggtccggagaaagcagccctgtcagaggagacatgctgggactgaaaagcgagctggagaagagattctttggaaagacctttgatgacaatatccacatccagctcatttacaacatcctggatatcgagaaaatcctggccgtgtatgtgaccaacatcgtgtacgctctgaacaacatgctcggcgtcaagggcagcgagtcccacgacgactttattggctatctgtccaccaacaatatttacgatgtcttcattgaccccgacaacagcagcctctccgacgacaaaaaagccaacgtcaggaagagcctcagcaaattcaacgccctgctgaagaccaagaggctcggatactttggcctggaggaacccaagaccaaggacaacagagtgagccaggcctataagaaaagggtgtaccacatgctggccatcgtgggccagatcagacagtgcgtgttccatgacaagtccggcgccaagagattcgacctgtactccttcattaacaacatcgaccctgagtacagggatacactggattacctcgtggaggagaggctgaagagcatcaacaaagactttattgaggacaacaaagtcaacatcagcctgctgatcgatatgatgaagggctacgaagctgacgacatcatcaggctgtactatgatttcattgtcctgaagagccagaagaacctgggattctccattaagaaactgagagaaaagatgctcgacgagtacggcttcaggttcaaggacaagcagtatgacagcgtgagatccaagatgtacaagctgatggattttctcctgttttgcaactattacaggaacgacatcgccgccggcgaatccctggtcaggaaactgagattcagcatgaccgacgacgagaaggaaggcatctacgccgacgaagccgctaagctgtggggaaaatttagaaatgacttcgagaacatcgctgaccacatgaacggcgatgtgatcaaggagctcggcaaggctgacatggatttcgacgagaagatcctggattccgagaagaagaatgccagcgatctgctgtacttcagcaagatgatttacatgctcacatattttctcgatggcaaggagatcaacgatctcctgaccacactgatcagcaagttcgacaacattaaagagttcctcaaaattatgaaatccagcgccgtggatgtcgagtgcgaactcaccgccggctacaagctcttcaacgacagccagaggatcaccaatgagctgttcattgtgaaaaatatcgctagcatgaggaaacccgccgcctccgctaaactgacaatgtttagagatgccctcaccatcctgggcatcgacgataagatcacagacgacagaattagcggaatcctgaagctcaaggaaaagggcaagggaatccatggcctcagaaatttcattaccaataacgtgatcgaaagcagcaggttcgtgtatctgatcaagtacgccaatgcccaaaagatcagggaggtggccaagaacgaaaaggtggtgatgttcgtgctgggcggcattcctgacacacagatcgaaaggtactacaagagctgtgtggagttccccgatatgaactccagcctgggcgtgaagagatccgaactggctaggatgatcaagaatattagcttcgacgacttcaagaacgtgaagcaacaggccaaaggaagggagaacgtcgccaaagagagagccaaggccgtgatcggactctacctgaccgtcatgtacctcctcgtgaagaacctggtgaacgtgaacgctagatacgtcatcgccatccattgcctcgagagggacttcggactgtacaaggagatcattcccgagctggccagcaaaaatctcaagaacgattacagaatcctgagccaaaccctgtgcgagctgtgtgacaagtcccccaacctgtttctgaagaagaatgaaaggctgagaaagtgcgtcgaagtcgacatcaacaacgctgacagctccatgaccaggaaatacaggaactgtatcgcccatctgaccgtggtgagggaactcaaggagtacatcggagatatctgcaccgtggactcctacttcagcatttatcactacgtgatgcagaggtgcattaccaagagagaaaatgacacaaagcaggaggagaagattaagtacgaggacgatctgctgaaaaaccacggatacaccaaggatttcgtcaaggccctcaatagccccttcggctacaatatccctaggtttaaaaacctgagcatcgagcagctgtttgacagaaatgaatacctgacagagaagggatccggacctaagaaaaagaggaaggtggcggccgct

SEQ ID NO: 122 - DNA, 2803 bp, Artificial Sequence
  Human codon-optimized Ruminococcus flavefaciens FD1 nCas1
aagaaaaaaatgagcctcagagagaagagggaagccgagaaacaagccaaaaaagccgcctacagcgctgcctccaaaaacacagatagcaaacctgctgagaagaaggccgagacacccaagcctgctgagattatttccgacaactccagaaacaaaaccgccgtcaaggccgccggcctgaaatccacaattatctccggcgataagctgtacatgaccagcttcggaaagggcaacgccgccgtgatcgagcagaaaattgatattaatgattactccttctccgccatgaaggatacccccagcctggaagtggacaaggccgagagcaaggagatctccttctccagccaccacccttttgtcaaaaatgataaactgaccacctataatcccctgtacggcggaaaagataaccccgaaaagcccgtgggcagagatatgctcggcctcaaagacaagctcgaggagaggtacttcggatgcaccttcaatgacaacctgcacattcagattatctataacatcctcgacattgagaaaattctggccgtgcactccgccaacattaccacagctctggaccacatggtggacgaggacgatgagaagtacctcaatagcgattacattggctacatgaacaccatcaacacctatgatgtgttcatggacccctccaaaaattcctccctctcccccaaggacaggaagaacattgataacagcagggccaagtttgagaagctcctgtccacaaagaggctcggctactttggctttgactacgatgccaacggcaaggataagaagaaaaacgaggagatcaagaaaaggctctatcacctgacagcctttgccggccagctcaggcagtggtccttccatagcgccggcaattatcccagaacctggctctacaagctcgatagcctggacaaagagtatctcgacaccctggaccattattttgataagagattcaacgatattaatgacgatttcgtcaccaagaacgccacaaacctgtacatcctgaaggaggtcttccccgaggctaatttcaaggatatcgccgatctctactacgatttcattgtcatcaaaagccataagaatatgggattttccatcaagaagctgagggagaagatgctggagtgcgatggagctgatagaatcaaggaacaggacatggactccgtgaggagcaagctgtataagctgatcgatttttgcattttcaaatactaccacgagttccctgagctgagcgagaagaacgtcgacatcctcagggctgccgtgagcgataccaaaaaggacaacctgtatagcgacgaggccgctaggctctggagcatcttcaaggaaaagttcctgggcttctgcgacaagattgtggtgtgggtgaccggcgagcacgagaaagacatcacctccgtgattgacaaggacgcttacaggaacaggtccaacgtgagctacttttccaagctgatgtacgccatgtgtttcttcctggatggaaaggaaattaacgatctgctgaccacactgatcaacaaattcgacaacattgccaaccagatcaagaccgccaaggagctcggcattaacaccgccttcgtgaaaaactacgattttttcaaccacagcgaaaagtacgtggacgagctgaacattgtgaaaaacatcgccaggatgaaaaagccctccagcaacgccaagaaggccatgtaccatgacgccctgacaatcctgggcatccccgaggatatggacgagaaggccctggatgaggagctcgatctcatcctggaaaagaagaccgatcccgtgaccggaaagcccctcaaaggcaaaaatcccctgaggaattttatcgctaataatgtgattgagaatagcaggttcatttacctgattaaattttgcaaccctgagaatgtcaggaaaatcgtgaacaacacaaaggtgaccgagttcgtgctcaagaggatccccgatgcccagatcgagaggtactacaagagctgtaccgattccgagatgaaccctcccacagaaaagaagatcaccgagctggccggcaagctgaaagatatgaattttggaaacttcaggaacgtgaggcagtccgccaaggaaaacatggagaaagagaggttcaaggccgtcattggcctgtacctcaccgtcgtctacagagtggtcaaaaacctggtggacgtcaatagcaggtacatcatggccttccatagcctggagagagattcccagctgtacaacgtgagcgtcgataatgattacctggccctcaccgacaccctggtcaaggagggcgacaacagcaggtccaggtacctggccggaaataaaaggctgagggattgcgtgaagcaagacatcgacaatgccaaaaagtggttcgtctccgacaagtacaactccattacaaagtacaggaacaacgtggcccacctgaccgccgtgagaaactgcgccgagttcatcggcgacattaccaagatcgactcctacttcgccctctaccactacctcattcagagacagctggctaagggcctcgatcatgagaggtccggattcgacaggaattacccccagtacgcccctctgttcaaatggcacacctacgtgaaggatgtcgtcaaggccctgaacgcccccttcggatacaatatccctaggttcaagaatctgagcatcgacgccctctttgataggaatgaaatcaagaagaacgatggcgagaagaagtccgacgactgagcct

SEQ ID NO: 123 - DNA, 2799 bp, Artificial Sequence
  Human codon-optimized Ruminococcus flavefaciens FD1 nCas1 HEPN-/-
aagaaaaaaatgagcctcagagagaagagggaagccgagaaacaagccaaaaaagccgcctacagcgctgcctccaaaaacacagatagcaaacctgctgagaagaaggccgagacacccaagcctgctgagattatttccgacaactccagaaacaaaaccgccgtcaaggccgccggcctgaaatccacaattatctccggcgataagctgtacatgaccagcttcggaaagggcaacgccgccgtgatcgagcagaaaattgatattaatgattactccttctccgccatgaaggatacccccagcctggaagtggacaaggccgagagcaaggagatctccttctccagccaccacccttttgtcaaaaatgataaactgaccacctataatcccctgtacggcggaaaagataaccccgaaaagcccgtgggcagagatatgctcggcctcaaagacaagctcgaggagaggtacttcggatgcaccttcaatgacaacctgcacattcagattatctataacatcctcgacattgagaaaattctggccgtgcactccgccaacattaccacagctctggaccacatggtggacgaggacgatgagaagtacctcaatagcgattacattggctacatgaacaccatcaacacctatgatgtgttcatggacccctccaaaaattcctccctctcccccaaggacaggaagaacattgataacagcagggccaagtttgagaagctcctgtccacaaagaggctcggctactttggctttgactacgatgccaacggcaaggataagaagaaaaacgaggagatcaagaaaaggctctatcacctgacagcctttgccggccagctcgcgcagtggtccttcgctagcgccggcaattatcccagaacctggctctacaagctcgatagcctggacaaagagtatctcgacaccctggaccattattttgataagagattcaacgatattaatgacgatttcgtcaccaagaacgccacaaacctgtacatcctgaaggaggtcttccccgaggctaatttcaaggatatcgccgatctctactacgatttcattgtcatcaaaagccataagaatatgggattttccatcaagaagctgagggagaagatgctggagtgcgatggagctgatagaatcaaggaacaggacatggactccgtgaggagcaagctgtataagctgatcgatttttgcattttcaaatactaccacgagttccctgagctgagcgagaagaacgtcgacatcctcagggctgccgtgagcgataccaaaaaggacaacctgtatagcgacgaggccgctaggctctggagcatcttcaaggaaaagttcctgggcttctgcgacaagattgtggtgtgggtgaccggcgagcacgagaaagacatcacctccgtgattgacaaggacgcttacaggaacaggtccaacgtgagctacttttccaagctgatgtacgccatgtgtttcttcctggatggaaaggaaattaacgatctgctgaccacactgatcaacaaattcgacaacattgccaaccagatcaagaccgccaaggagctcggcattaacaccgccttcgtgaaaaactacgattttttcaaccacagcgaaaagtacgtggacgagctgaacattgtgaaaaacatcgccaggatgaaaaagccctccagcaacgccaagaaggccatgtaccatgacgccctgacaatcctgggcatccccgaggatatggacgagaaggccctggatgaggagctcgatctcatcctggaaaagaagaccgatcccgtgaccggaaagcccctcaaaggcaaaaatcccctgaggaattttatcgctaataatgtgattgagaatagcaggttcatttacctgattaaattttgcaaccctgagaatgtcaggaaaatcgtgaacaacacaaaggtgaccgagttcgtgctcaagaggatccccgatgcccagatcgagaggtactacaagagctgtaccgattccgagatgaaccctcccacagaaaagaagatcaccgagctggccggcaagctgaaagatatgaattttggaaacttcaggaacgtgaggcagtccgccaaggaaaacatggagaaagagaggttcaaggccgtcattggcctgtacctcaccgtcgtctacagagtggtcaaaaacctggtggacgtcaatagcaggtacatcatggccttccatagcctggagagagattcccagctgtacaacgtgagcgtcgataatgattacctggccctcaccgacaccctggtcaaggagggcgacaacagcaggtccaggtacctggccggaaataaaaggctgagggattgcgtgaagcaagacatcgacaatgccaaaaagtggttcgtctccgacaagtacaactccattacaaagtacgcgaacaacgtggccgccctgaccgccgtgagaaactgcgccgagttcatcggcgacattaccaagatcgactcctacttcgccctctaccactacctcattcagagacagctggctaagggcctcgatcatgagaggtccggattcgacaggaattacccccagtacgcccctctgttcaaatggcacacctacgtgaaggatgtcgtcaaggccctgaacgcccccttcggatacaatatccctaggttcaagaatctgagcatcgacgccctctttgataggaatgaaatcaagaagaacgatggcgagaagaagtccgacgactga

SEQ ID NO: 124 - DNA, 2757 bp, Artificial Sequence
  Ruminococcus bicirculans nCas1 sequence
atggcaaaaaagaataaaatgaagcctagagagctgcgtgaggctcagaaaaaagccagacagctcaaagcggctgagataaataataacgctgttcctgcaatcgctgccatgcctgctgcagaggctgctgcacctgcggcagagaagaaaaaatcctccgtaaaggcggcaggaatgaagtctattcttgtcagtgaaaataaaatgtacataacctctttcggcaagggcaattctgcggtgcttgaatatgaggtggataataatgactacaacaaaactcagctttcctcaaaggacaacagtaatatcgagctctgtgatgtaggcaaagtaaacatcactttttcgagcagacgtggctttgagagcggtgtggagataaacacttcaaaccctactcacagaagcggtgaaagctcgtctgtaagaggggatatgctggggcttaaatcggagcttgaaaagcgctttttcggcaagaattttgatgataatatacatatccagcttatttacaacattctggatatcgaaaagatacttgcagtgtatgtgacgaatatcgtttatgcactgaacaatatgcttggggaaggcgatgagagcaattacgatttcatggggtatctttccacatttaacacttataaagtttttactaatcctaatggcagcactttatccgacgataagaaagagaatatcagaaaaagtcttagcaaattcaatgccctgctgaaaactaagcgtcttggctatttcggccttgaagagccaaagacaaaggatacaagagcttcggaagcatacaaaaagcgtgtttatcatatgcttgcaattgtggggcagataagacagtgtgtttttcatgataaatcgggtgcaaaaagatttgacctttacagttttattaacaatattgatcccgaatacagagaaacccttgactatcttgtagatgagagatttgattctataaataagggctttatccagggcaacaaggtcaatatcagcttgcttattgatatgatgaaaggctatgaggctgatgatatcatacgcctttattacgatttcattgtgcttaaatctcagaaaaatctcggtttttctatcaaaaagcttcgtgagaaaatgctggacgaatacggcttcagatttaaggacaagcaatatgactctgtgcgctcaaagatgtacaagcttatggattttctgcttttctgcaactactacagaaatgacattgccgcaggcgaatctcttgtgcgcaaactgcgtttttcaatgaccgatgatgaaaaagaggggatatatgctgatgaagcggcaaagctttggggcaaattcaggaatgattttgaaaatatcgccgaccacatgaacggtgacgttatcaaggagcttggcaaggctgacatggattttgatgagaaaattcttgacagcgaaaagaagaatgcgtctgaccttttgtatttctccaaaatgatatatatgctcacatattttcttgacggcaaggagataaacgaccttcttacaacgcttatcagcaagtttgataacatcaaggagtttttgaagataatgaaaagctctgctgttgatgttgagtgtgaacttacggcgggctacaagctgttcaatgacagccagaggataaccaacgagctttttatcgtaaagaacattgcttccatgagaaagcctgcggcttcggcgaagcttacgatgttccgtgacgcactgactatactcggtatagacgacaagatcacggacgataggataagcgagattctaaaacttaaagaaaaaggcaagggcatacatggcctgagaaatttcataacaaacaatgttatcgagtcctctcggtttgtataccttatcaagtatgcgaacgctcagaagataagagaagtggctaagaatgagaaagttgtcatgtttgttcttgggggtatccctgacacgcagatagagcgttattacaagagttgtgtggaatttcctgacatgaacagttctttgggagtaaagcgcagtgagcttgcgagaatgataaagaacatcagctttgatgatttcaaaaatgtgaaacagcaggcaaagggcagagaaaacgtggctaaggagagggcaaaggctgttatcgggctttatcttacggtcatgtatctgctggtgaaaaatcttgtgaatgtcaatgcaaggtatgttattgcgatacactgccttgaacgtgattttgggctgtataaggagataattcctgagttggcttcaaagaacttgaaaaatgactacaggatactttcacagacgctttgtgaactttgtgataagtcgccgaatttgttcttgaaaaagaacgagcggctgcgcaagtgcgttgaagttgatatcaataatgcagacagcagcatgacaagaaaataccgcaactgtattgctcatcttactgtagttcgtgaactgaaagaatacataggagatatttgtacagtggattcttacttctccatttatcattatgttatgcagcgctgtatcacgaaaagggaaaatgacacaaagcaagaagagaaaataaagtatgaggacgatcttttaaaaaatcacggctatacgaaagactttgtaaaggctctcaactcgccgtttggatacaacattccgaggtttaaaaatctttcaattgagcagttgtttgacagaaatgaatatcttactgaaaagtag

SEQ ID NO: 125 - DNA, 2865 bp, Artificial Sequence
  Eubacterium siraeum nCas1 sequence
atgggtaagaaaatacacgcacgagatctcagagaacaaagaaagaccgatagaacggaaaaatttgcagatcagaacaaaaaacgtgaagcagagagggcagttccgaaaaaagacgcagccgtttctgtaaaatcagtttcttctgtttcatcaaaaaaagacaatgtaacaaaatctatggctaaagccgcaggcgtgaagtcggtttttgctgtaggaaatactgtttatatgacttcattcggcagaggaaacgatgctgtacttgagcagaaaatagtcgatacatcgcacgaaccgctgaatattgacgatcctgcatatcagttgaacgttgtcacaatgaacggttattcggttaccggtcacagaggtgaaacggtatctgccgtaacggataatccgctgcgccgttttaacggaagaaagaaagatgaaccggaacagtctgtgcctacggatatgctgtgcctgaaaccgactcttgaaaagaaattcttcggcaaagaattcgatgataatatacatatccagcttatttacaatattcttgacattgaaaaaatactggcggtttattcgaccaacgctatttacgcattgaataatatgagtgctgacgaaaatatcgaaaacagcgatttcttcatgaaacgtaccaccgatgaaacctttgacgattttgaaaagaaaaaggagagtacaaacagtcgagagaaagccgattttgacgcatttgaaaaattcatcggcaattacaggctggcttattttgccgatgcattttatgtaaataaaaagaatcccaaaggtaaagcaaaaaatgttctgcgtgaggataaagaactttactccgtgctcactctgatcggtaaactgcgtcattggtgtgttcacagtgaggagggcagagcagaattctggctgtataagctcgatgaacttaaagatgatttcaaaaatgtactcgacgttgtttataaccgtcctgttgaagaaataaacaaccgctttatagaaaacaataaggtaaacatacagatactgggctcggtatacaagaacaccgatattgccgaacttgtaaggtcatattacgaatttcttatcacaaagaagtataaaaatatgggcttttcaataaagaagctccgtgagagtatgctcgaaggtaaaggttacgccgataaagaatatgattctgtaaggaataagctgtatcagatgacggatttcatcttatacacaggatatatcaacgaagacagcgatagagccgacgatcttgtgaacactttgagaagttcgctcaaagaggatgataagacaaccgtatattgcaaggaagcggattatctgtggaaaaaataccgtgaatccataagagaggttgccgatgcgcttgatggcgataacattaaaaagctgagcaaatcgaatattgaaattcaggaagacaagctgagaaaatgttttatcagctatgccgacagcgtatcggaatttaccaagcttatttatctgctgacaagatttttaagcggtaaggagatcaacgatcttgtcacaacgctgataaacaagtttgacaatatcagaagcttccttgaaataatggacgagcttgggcttgacaggaccttcaccgccgagtacagcttctttgaaggcagtacaaagtatcttgccgagcttgtcgagcttaacagctttgtgaaatcgtgttcgtttgatataaacgcaaaaagaacaatgtatcgcgatgcgctggatattctcggcattgaatcggataagaccgaagaagatattgagaagatgatcgataatatccttcagatcgacgcaaacggtgataaaaagctcaagaaaaacaacggtctgagaaatttcattgcaagtaacgttatagattcaaaccgattcaagtaccttgtgcggtacggaaatccaaagaagattcgtgaaacggcaaaatgcaagcccgctgtaaggtttgtgctgaatgagatcccggacgcacagatcgaaagatattatgaggcttgttgcccaaaaaatacagctttatgctctgcaaataagagacgtgagaaactggctgatatgatagctgaaataaagtttgagaatttttcggatgccggcaattatcagaaagcaaatgtcacatcaagaacgtctgaagctgaaatcaagcggaagaatcaggctataatccgtctttatcttaccgttatgtacattatgctgaagaaccttgtaaatgtgaacgccagatacgttatcgctttccattgcgttgaaagggatacgaagctgtatgcggaaagcggtctggaagtcggtaatatagaaaaaaacaagacaaatcttactatggctgtaatgggagtcaagctcgaaaacggaatcataaaaacggaatttgacaagagctttgcagaaaatgccgcaaacagatatctcaggaatgcacgctggtacaagctgatactggataatttaaagaagtcggaaagagcggttgtcaatgagttcagaaatactgtctgccatctgaatgcgataaggaatatcaatatcaatatcaaggaaataaaagaggtcgagaactactttgctctgtaccactacctcattcagaaacatctcgaaaatcgttttgccgataaaaaagtagaaagagacaccggcgattttataagcaagctcgaagaacacaagacttactgcaaggactttgtaaaagcatattgtacgcctttcggatataaccttgtgagatataaaaaccttacgatagacgggctgtttgataagaattaccccggaaaagacgattctgatgaacagaaataa

SEQ ID NO: 126 - DNA, 2799 bp, Artificial Sequence
  Ruminococcus flavefaciens FD1 nCas1 sequence
atgaaaaagaaaatgtctctccgtgaaaagcgtgaagccgagaaacaggctaaaaaagctgcatattcagcagcttcaaaaaatacagattctaagcctgcggaaaagaaagcagaaactccaaagcctgcggagattatttccgataattccagaaataagaccgctgtaaaggcggctggtctgaaatcaacaattatcagcggcgataagctgtatatgacatctttcggcaagggtaacgctgctgttattgagcagaaaatagatatcaatgattattctttttcagctatgaaagatactccgtcgcttgaagttgataaagcagaatcaaaagagatctctttttcaagtcaccatccttttgtaaagaatgataagctgacaacatataaccctttatacggcggcaaggataaccccgaaaagcctgtcggcagggatatgctcggcttaaaagataagcttgaagaacgctatttcggatgtacattcaatgataatcttcacatccagattatctataacatacttgacatcgagaagattttagctgttcattctgcaaatatcacaactgcgcttgaccacatggttgatgaagacgatgaaaaatatcttaacagcgattatatcggctacatgaataccataaatacatatgacgtgtttatggatccttcaaagaattcttcattaagccctaaagatagaaagaatattgacaacagccgtgcaaaatttgagaaactgctttcaactaagcgccttggctattttggatttgactatgatgcaaacggtaaggacaagaaaaagaacgaggaaataaaaaagcgtttatatcatctcacagcttttgcaggtcagctccgtcagtggagttttcatagtgctggcaattatccgagaacatggctttacaagctcgattcactggataaggaatatcttgatactcttgaccattacttcgataaacgttttaacgatataaacgatgatttcgtaactaagaatgctaccaatctctatattctgaaagaagtatttcccgaagcaaacttcaaggatattgccgatctttattacgatttcatagttataaagtcgcacaaaaatatgggattctccataaaaaagctgagggagaagatgcttgaatgtgatggtgcagacaggataaaagaacaggatatggactctgttcgctcaaagctgtataagctcatagacttttgcattttcaagtattatcacgaatttcctgaacttagtgaaaagaatgtggatatactcagagcggctgtatccgatacaaaaaaagataacctttattctgatgaggctgcacgtttatggagcatatttaaagaaaaattcctcggcttctgtgataagatagttgtatgggtaacaggagagcatgagaaagatatcacatccgttattgataaggatgcttacaggaacaggagcaatgtttcatatttctcaaagctgatgtatgcaatgtgctttttccttgacggaaaagagataaatgaccttctcactactcttatcaacaaattcgataatatcgctaaccagataaaaacagccaaagaacttggcattaatactgcttttgtaaagaattacgatttcttcaatcacagcgagaaatatgtcgatgaactgaacatcgtcaagaatattgcaagaatgaagaagccttcaagtaatgccaaaaaagctatgtatcatgatgcgcttactattctcggaatacctgaggatatggatgaaaaagctcttgatgaggaactggatttaattcttgaaaaaaagacagacccagtaactggcaagccactgaaaggtaagaatcctttacgtaattttatcgcaaacaatgtgatagagaattcaagattcatatatcttatcaagttctgcaatcctgagaatgtacgtaaaatcgtgaataatacaaaggtcactgagtttgtgttaaagcgtattcccgatgctcagatcgaacgctattataagtcgtgtacagattctgaaatgaatccgcctactgaaaagaagatcaccgaacttgctggtaagttaaaggatatgaactttggcaacttccgaaatgtgagacagtctgctaaagagaatatggagaaggagcgcttcaaagctgttatagggctttatctcacggtagtatatcgtgttgtcaagaatcttgttgatgtaaactcacgatatatcatggcttttcattcgcttgaacgtgattcacaactgtataacgtatctgttgataatgattatcttgcacttaccgatactcttgttaaggagggagataattccagaagcagatatcttgcaggcaacaagcgtctgagagattgtgtgaagcaggatatcgataatgcaaaaaagtggtttgttagtgataagtacaatagcataaccaagtacaggaataacgttgcccatcttaccgctgtacgtaactgcgctgaattcatcggagatataacgaagatagactcctattttgcattgtatcattatctcattcagagacagcttgcgaaaggtcttgaccatgagcgaagtggctttgacagaaactatccacagtatgcaccgctgtttaagtggcatacgtatgtaaaggatgttgtcaaggctctgaatgctccatttggctacaatatccctcgtttcaagaatctcagcatagatgcactttttgaccgcaacgaaataaagaagaatgacggcgagaaaaaatccgatgat

SEQ ID NO: 127 - DNA, 2835 bp, Artificial Sequence
  Ruminococcus albus nCas1 sequence
atggcaaaaaaatcgaaaggtatgagccttagagaaaaacgtgaacttgaaaagcagaaaaggatacaaaaggcagctgtgaattcagttaatgatacacctgaaaaaacagaagaagcaaatgtcgtatctgtaaatgtcaggacatcggctgagaataagcatagtaaaaaatctgctgccaaagctttgggactgaaatccgggctggttatcggtgatgagctgtaccttacttcattcggcagaggtaacgaagcaaagcttgaaaagaagatatccggtgacactgtcgaaaaacttggcattggtgcttttgaagtcgccgaacgtgacgaatcaacgcttaccctcgaaagtggcaggataaaggacaagaccgccagacccaaagaccccagacatataaccgtcgatacacaaggtaaattcaaggaagatatgcttgggatacgcagtgtactggagaaaaagatatttggcaaaacatttgatgataatatccatgttcagcttgcgtacaatatcctggatgtcgaaaagataatggcacagtatgtcagcgatatcgtatatatgctgcataatactgataaaacagaaagaaacgataatcttatggggtatatgagcatcaggaatacctataagacattttgtgatacgtcaaatcttcccgatgatacaaaacaaaaagttgaaaatcagaagagagagtttgacaagatcataaaaagcggcagacttgggtatttcggcgaagcttttatggtaaacagcggcaatagtaccaagcttagacccgagaaagagatatatcatatctttgcgcttatggcgagcctgaggcagagttactttcacggatatgtaaaagataccgattatcagggaaccacatgggcatatactcttgaggacaagctgaaaggtccgagccatgagttcagggaaaccattgataagatatttgatgagggattcagcaagatcagcaaggactttggcaagatgaacaaggtcaaccttcagatacttgaacagatgattggtgaactgtatggcagtatagaacgacaaaacctcacttgcgattactatgacttcattcaactgaaaaagcataagtatcttggattttctataaagcgtcttagagagaccatgcttgaaacaacaccggctgaatgttataaagctgaatgctataacagcgagcgtcaaaagctgtataagctgatagatttcctgatatatgatctttactataaccgtaagcctgcacgcatcgaagaaatcgtggacaagctgagggaatctgtgaacgacgaagagaaagaatccatatattcagttgaggcgaagtatgtctatgaatcacttagcaaagttctggataaatcgctgaaaaacagtgtgtctggtgaaacgataaaggatctccaaaagagatatgatgacgaaacagcaaacaggatctgggatatctcacagcacagtataagtggaaatgtcaactgtttctgcaagctaatttatattatgaccctgatgcttgacggcaaggagataaatgatctgctgacaacgctggtaaacaagttcgataacatagcatcatttatagatgttatggacgaacttggcttggagcatagttttacagataactataaaatgtttgccgacagcaaggctatatgccttgatctgcagttcataaacagttttgcacgtatgtcaaagatcgatgatgagaagtcaaaaagacagcttttccgtgatgcgcttgtcatactggatatcggtaataaagatgagacttggataaataattatctggattctgatattttcaaactggacaaagaaggtaacaagttaaagggcgcaaggcatgatttcaggaactttatagccaataatgttataaagtcatcacgtttcaaatacctagtaaaatacagcagtgccgatggtatgataaagctgaaaacgaatgaaaagctgataggctttgttctggataagcttccagaaacgcagatagaccgctactatgaatcatgcggacttgacaatgcggtagtagataagaaagtcaggatagaaaagctatcggggcttatcagagatatgaagttcgatgatttcagcggtgtcaaaacctcaaacaaagcaggagataatgacaaacaggataaggcgaaatatcaggcgataataagcctgtacctcatggtgctgtatcagatagtcaagaacatgatatatgtcaactcacgttatgttatcgctttccattgtcttgaacgtgactttggtatgtatggaaaagattttggaaagtattatcaaggctgccgaaaacttacagatcattttattgaagaaaagtacatgaaagagggtaaacttggctgcaataaaaaagtcggcagatatctgaaaaataatatttcctgctgcactgatggactgataaatacctaccgtaatcaggttgatcactttgcagtggtaaggaagataggcaactatgcggcatatatcaagagtatcggttcgtggtttgaactttatcactatgtaatacagaggatagtttttgacgaatacagatttgcacttaacaacactgaaagcaactataagaacagcatcatcaagcaccatacctactgtaaggatatggtcaaggcactgaacacacctttcggttatgacctgccgagatacaagaatctttctatcggtgatctgtttgatcgcaataattatctgaataaaacaaaagagtcaatagatgcaaatagctctattgacagtcagtga

SEQ ID NO: 128 - DNA, 2904 bp, Artificial Sequence
  Ruminococcus flavefaciens XPD nCas1 sequence
atgatcgaaaagaagaagtcatttgcaaagggcatgggagtaaaatcaacacttgtatccggttcaaaggtatacatgacgacgttcgcagaaggaagcgatgccagacttgaaaagatcgttgaaggcgattctatcagatctgtcaacgaaggagaagcgttctcagctgaaatggctgataagaatgcaggctacaagatcggtaacgcaaagttcagccacccaaagggctatgctgtagttgcaaacaaccccttatacaccggaccggtacagcaggatatgctcggtctgaaggaaacgcttgaaaagagatattttggagagtctgccgacggaaatgataatatctgtattcaggtcatccataatatcctcgatatcgaaaagatcctcgctgaatatataaccaatgctgcttatgcggtaaacaatatttccggtcttgataaggatatcatcggttttggtaagttcagtacggtctatacttatgatgagttcaaggatcctgaacatcacagagcagctttcaacaataacgataagttaattaatgccatcaaggcacagtatgatgaatttgacaatttccttgataatcctcgtctcggctactttggacaggcttttttcagtaaggaaggcagaaattacattatcaattacggcaacgagtgttatgatattcttgctttactcagcggattgcgtcactgggtagtacataataatgaggaagaatcaaggatttcccgtacatggctttataatctcgacaagaatcttgacaacgaatatatctctactctcaattatctgtatgatagaattacaaacgaattaacaaattccttctcaaagaatagtgcagccaacgtaaactatatcgctgaaacccttggtattaatcctgctgaatttgcagagcagtatttcagattcagtatcatgaaggaacagaagaatctcggtttcaatattactaagctgagagaagtaatgcttgacagaaaggatatgtctgagatccgtaaaaatcataaggtctttgattcaatccgtactaaggtctatactatgatggatttcgttatctacagatattacattgaagaggatgcaaaggttgctgctgccaacaagtctctgccggataacgaaaaaagcctcagtgaaaaggatatctttgttataaatctcagaggaagctttaacgatgatcagaaggatgccctttattatgatgaggccaatcgtatttggagaaagctcgaaaacattatgcacaatatcaaggaattcagaggcaataagacacgtgaatacaagaagaaggatgctccaagactccccagaattcttcctgccggaagggatgtttccgcgttctcaaagttgatgtacgctcttaccatgttccttgatggtaaggagatcaatgatcttctcaccacgctcatcaataagttcgataacatccagagtttcctcaaggtaatgcctcttatcggagtgaatgcaaagtttgttgaggaatatgccttcttcaaggacagcgcaaagattgctgacgaactcaggctgattaagagctttgccagaatgggagaacctatcgcagatgcaagacgtgctatgtatatcgatgctatcaggattctcggaacaaacctcagctatgatgagcttaaggcccttgccgatactttttcgcttgatgaaaacggcaacaagcttaagaagggcaagcacggcatgagaaacttcatcattaataatgtaatcagtaacaagcgcttccattatctcattcgttacggtgatcctgcacatctccatgagatcgccaagaatgaagctgttgtaaagttcgtcctcggcaggatagctgatatccagaagaagcagggacagaacggaaagaatcagatcgacaggtactatgagacctgtatcggcaaggacaagggcaagtctgtctccgaaaaggttgatgccctcacaaagattatcaccggtatgaactacgatcagttcgataagaagagaagcgttattgaggatactggaagagaaaacgctgagagagaaaagttcaagaagatcatcagcctctatcttactgtcatttatcacatccttaagaatattgttaatatcaatgcgcgttacgttatcggcttccattgcgttgagcgtgatgcacagctctataaggaaaagggctatgatatcaacctcaagaagctcgaagaaaaggggttttcatcagtcacaaagctgtgtgcaggtattgatgagactgctcctgacaagcgtaaggatgttgaaaaggaaatggctgagcgtgcaaaggaatctatcgatagccttgaatctgcaaatcctaagctttacgcaaactatatcaagtattctgacgagaagaaggctgaggaatttactagacagatcaaccgtgagaaggcaaagaccgctctgaatgcatatctcagaaatactaagtggaatgtgataatcagggaagatcttcttagaatcgataataagacatgtacgctctttagaaataaggccgttcatcttgaagttgcaagatatgttcatgcatatatcaacgatattgccgaagtaaacagctatttccagctttatcattacatcatgcagagaatcatcatgaacgaaagatatgaaaagtcttctggaaaggtaagcgaatacttcgatgctgtgaacgatgaaaagaagtacaacgacaggcttctgaagctgttgtgcgttccatttggttactgcatcccgagattcaagaatctctccattgaagctttgttcgacaggaacgaagcagctaagtttgacaaggaaaagaagaaagtatcaggtaattcatag

SEQ ID NO: 129 - DNA, 36 bp, Artificial Sequence
  Consensus DR
gaactacacccgtgcaaaaatgcaggggtctaaaac

SEQ ID NO: 130 - DNA, 36 bp, Artificial Sequence
  Consensus DR
ctactacactggtgcaaatttgcactagtctaaaac

SEQ ID NO: 131 - RNA, 36 nt, Artificial Sequence
  Consensus DR
caaguaaaccccuaccaacuggucgggguuugaaac

SEQ ID NO: 132 - RNA, 36 nt, Artificial Sequence
  Consensus DR
cuacuacacuggugcgaauuugcacuagucuaaaac

SEQ ID NO: 133 - RNA, 36 nt, Artificial Sequence
  Consensus DR
gaacuauaguagugugaauuuacacuacucuaaaac

SEQ ID NO: 134 - RNA, 36 nt, Artificial Sequence
  Consensus DR
cuacuauacuagugugauuuuacacuagucuaaaac

SEQ ID NO: 135 - RNA, 36 nt, Artificial Sequence
  Consensus DR
gaccaacaccucugcaaaacugcaggggucuaaaac

SEQ ID NO: 136 - RNA, 36 nt, Artificial Sequence
  Consensus DR
gcacuacaccccccugaaacaugaggggucuaaaac

SEQ ID NO: 137 - DNA, 36 bp, Artificial Sequence
  Consensus DR
gcactacacccccctgaaacatgaggggtctaaaac

SEQ ID NO: 138 - protein, 966 aa, Artificial Sequence
  50% consensus sequence for 7 full-length nCas1 orthologues
  SITE (2)..(4): Xaa is any amino acid
  SITE (13)..(13): Xaa is any amino acid
  SITE (22)..(23): Xaa is any amino acid
  SITE (25)..(25): Xaa is any amino acid
  SITE (32)..(33): Xaa is any amino acid
  SITE (39)..(40): Xaa is any amino acid
  SITE (43)..(44): Xaa is any amino acid
  SITE (46)..(56): Xaa is any amino acid
  SITE (60)..(60): Xaa is any amino acid
  SITE (69)..(70): Xaa is any amino acid
  SITE (72)..(72): Xaa is any amino acid
  SITE (74)..(76): Xaa is any amino acid
  SITE (83)..(83): Xaa is any amino acid
  SITE (86)..(86): Xaa is any amino acid
  SITE (88)..(88): Xaa is any amino acid
  SITE (94)..(95): Xaa is any amino acid
  SITE (97)..(108): Xaa is any amino acid
  SITE (110)..(135): Xaa is any amino acid
  SITE (139)..(147): Xaa is any amino acid
  SITE (149)..(150): Xaa is any amino acid
  SITE (157)..(158): Xaa is any amino acid
  SITE (162)..(162): Xaa is any amino acid
  SITE (167)..(167): Xaa is any amino acid
  SITE (191)..(192): Xaa is any amino acid
  SITE (201)..(209): Xaa is any amino acid
  SITE (211)..(211): Xaa is any amino acid
  SITE (213)..(214): Xaa is any amino acid
  SITE (216)..(217): Xaa is any amino acid
  SITE (220)..(221): Xaa is any amino acid
  SITE (225)..(225): Xaa is any amino acid
  SITE (227)..(228): Xaa is any amino acid
  SITE (230)..(242): Xaa is any amino acid
  SITE (244)..(249): Xaa is any amino acid
  SITE (251)..(251): Xaa is any amino acid
  SITE (253)..(257): Xaa is any amino acid
  SITE (264)..(264): Xaa is any amino acid
  SITE (267)..(270): Xaa is any amino acid
  SITE (273)..(280): Xaa is any amino acid
  SITE (283)..(283): Xaa is any amino acid
  SITE (285)..(285): Xaa is any amino acid
  SITE (290)..(292): Xaa is any amino acid
  SITE (296)..(298): Xaa is any amino acid
  SITE (300)..(310): Xaa is any amino acid
  SITE (314)..(314): Xaa is any amino acid
  SITE (316)..(318): Xaa is any amino acid
  SITE (320)..(321): Xaa is any amino acid
  SITE (323)..(325): Xaa is any amino acid
  SITE (329)..(331): Xaa is any amino acid
  SITE (333)..(337): Xaa is any amino acid
  SITE (340)..(341): Xaa is any amino acid
  SITE (343)..(345): Xaa is any amino acid
  SITE (350)..(352): Xaa is any amino acid
  SITE (354)..(357): Xaa is any amino acid
  SITE (359)..(368): Xaa is any amino acid
  SITE (373)..(375): Xaa is any amino acid
  SITE (377)..(378): Xaa is any amino acid
  SITE (391)..(391): Xaa is any amino acid
  SITE (394)..(397): Xaa is any amino acid
  SITE (399)..(404): Xaa is any amino acid
  SITE (411)..(411): Xaa is any amino acid
  SITE (415)..(415): Xaa is any amino acid
  SITE (417)..(417): Xaa is any amino acid
  SITE (420)..(420): Xaa is any amino acid
  SITE (423)..(424): Xaa is any amino acid
  SITE (426)..(427): Xaa is any amino acid
  SITE (429)..(433): Xaa is any amino acid
  SITE (435)..(436): Xaa is any amino acid
  SITE (438)..(439): Xaa is any amino acid
  SITE (442)..(442): Xaa is any amino acid
  SITE (444)..(445): Xaa is any amino acid
  SITE (447)..(447): Xaa is any amino acid
  SITE (450)..(452): Xaa is any amino acid
  SITE (454)..(455): Xaa is any amino acid
  SITE (458)..(459): Xaa is any amino acid
  SITE (462)..(477): Xaa is any amino acid
  SITE (479)..(481): Xaa is any amino acid
  SITE (483)..(485): Xaa is any amino acid
  SITE (487)..(487): Xaa is any amino acid
  SITE (489)..(489): Xaa is any amino acid
  SITE (491)..(506): Xaa is any amino acid
  SITE (509)..(510): Xaa is any amino acid
  SITE (517)..(517): Xaa is any amino acid
  SITE (520)..(520): Xaa is any amino acid
  SITE (542)..(542): Xaa is any amino acid
  SITE (546)..(546): Xaa is any amino acid
  SITE (549)..(549): Xaa is any amino acid
  SITE (554)..(556): Xaa is any amino acid
  SITE (558)..(560): Xaa is any amino acid
  SITE (562)..(563): Xaa is any amino acid
  SITE (565)..(566): Xaa is any amino acid
  SITE (568)..(569): Xaa is any amino acid
  SITE (571)..(572): Xaa is any amino acid
  SITE (575)..(577): Xaa is any amino acid
  SITE (580)..(580): Xaa is any amino acid
  SITE (584)..(584): Xaa is any amino acid
  SITE (587)..(589): Xaa is any amino acid
  SITE (593)..(593): Xaa is any amino acid
  SITE (600)..(600): Xaa is any amino acid
  SITE (605)..(612): Xaa is any amino acid
  SITE (614)..(616): Xaa is any amino acid
  SITE (618)..(624): Xaa is any amino acid
  SITE (626)..(629): Xaa is any amino acid
  SITE (631)..(632): Xaa is any amino acid
  SITE (634)..(636): Xaa is any amino acid
  SITE (648)..(648): Xaa is any amino acid
  SITE (650)..(650): Xaa is any amino acid
  SITE (653)..(653): Xaa is any amino acid
  SITE (656)..(656): Xaa is any amino acid
  SITE (659)..(659): Xaa is any amino acid
  SITE (662)..(664): Xaa is any amino acid
  SITE (666)..(667): Xaa is any amino acid
  SITE (669)..(669): Xaa is any amino acid
  SITE (673)..(675): Xaa is any amino acid
  SITE (679)..(680): Xaa is any amino acid
  SITE (684)..(684): Xaa is any amino acid
  SITE (694)..(696): Xaa is any amino acid
  SITE (698)..(706): Xaa is any amino acid
  SITE (708)..(709): Xaa is any amino acid
  SITE (711)..(713): Xaa is any amino acid
  SITE (715)..(718): Xaa is any amino acid
  SITE (720)..(720): Xaa is any amino acid
  SITE (723)..(723): Xaa is any amino acid
  SITE (726)..(726): Xaa is any amino acid
  SITE (728)..(733): Xaa is any amino acid
  SITE (735)..(738): Xaa is any amino acid
  SITE (742)..(742): Xaa is any amino acid
  SITE (745)..(745): Xaa is any amino acid
  SITE (753)..(753): Xaa is any amino acid
  SITE (755)..(756): Xaa is any amino acid
  SITE (778)..(779): Xaa is any amino acid
  SITE (782)..(797): Xaa is any amino acid
  SITE (800)..(812): Xaa is any amino acid
  SITE (816)..(852): Xaa is any amino acid
  SITE (856)..(856): Xaa is any amino acid
  SITE (858)..(858): Xaa is any amino acid
  SITE (861)..(861): Xaa is any amino acid
  SITE (863)..(863): Xaa is any amino acid
  SITE (865)..(868): Xaa is any amino acid
  SITE (871)..(871): Xaa is any amino acid
  SITE (874)..(875): Xaa is any amino acid
  SITE (877)..(877): Xaa is any amino acid
  SITE (886)..(887): Xaa is any amino acid
  SITE (890)..(890): Xaa is any amino acid
  SITE (892)..(897): Xaa is any amino acid
  SITE (899)..(912): Xaa is any amino acid
  SITE (914)..(914): Xaa is any amino acid
  SITE (917)..(917): Xaa is any amino acid
  SITE (920)..(920): Xaa is any amino acid
  SITE (926)..(926): Xaa is any amino acid
  SITE (932)..(932): Xaa is any amino acid
  SITE (941)..(942): Xaa is any amino acid
  SITE (949)..(954): Xaa is any amino acid
  SITE (956)..(957): Xaa is any amino acid
  SITE (959)..(963): Xaa is any amino acid
MXXXKKKMSLREXREAEKQARXXKXAAASKNXXAVPAKXXAAXXPXXXXXXXXXXXKKSXAKAAGLKSXXVXGXXXYMTSFGXGNXAXLEKKIXXBXXXXXXXXXXXXEXXXXXXXXXXXXXXXXXXXXXXXXXXNPLXXXXXXXXXVXXDMLGLKXXLEKXYFGKXFDDNIHIQLIYNILDIEKILAVYXXNIVYALNNXXXXXXXXXNXDXXGXXSTXXTYDXFXXPXXXXXXXXXXXXXIXXXXXXFXKXXXXXRLGYFGXAFXXXXKBXXXXXXXXKEXYXILALXXXLRQXXXHXXXXXXXXXXXWLYXLXXXLXXEXXXTLDXXXDXXXXXINXXFXXXNKVNXXXLXXXXGXXXXXXXXXXYYDFXXXKXXKNLGFSIKKLREXMLXXXXAXXXXXXZYDSVRXKLYXLXDFXIYXXYXXEXXXXXEXXVXXLRXSXXDXEKXXXYXXEAXXLWXXXXXXXXXXXXXXXXGXXXKXXXKXBXDXXXXXXXXXXXXXXXXBVXXFSKLIYXLTXFLDGKEINDLLTTLINKFDNIXSFLXVMXELGLXXXFXXXYXXFXXSXXIXXELXXXKNXARMXKPXXXAKRXMYRDALXILGIXXXXXXXXIXXXLXXXXXXXDXXXXKXXKXXXGLRNFIANNVIXSXRFXYLXRYXNPXXXRXXAXNEKXXXFVLXXIPDXQIERYYESCXXXBXXXXXXXXXIXXLXXXIXXXXFXBFXBVXQXXXXXXNXXXXKEKXKAXIGLYLTVXYXXVKNLVNVNARYVIAFHCLERDXXLYXXXXXXXXXXXXXXXXLTXXXXXXXXXXXXXYLKXXXXXXXXXXXXXXXXXXXXXXXXXXXXXXXXXXXXXYRNXVXHLXAXRXXXXYIXDIXXVXSYFALYHYXXQRXLXXXXXXKXXXXXXXXXXXXXXHXTYXKDXVKALNXPFGYNXPRYKNLSIXXLFDRNEXXXXXXEXXKXXXXXDSQ

SEQ ID NO: 139 - DNA, 2718 bp, Artificial Sequence
  Gut metagenome P1E0 nCas1 sequence
atggaacgtgaggtcaaaaagccccccaaaaaatccttggcaaaggcggcgggactgaagtccaccttcgtcatttcgccgcaggagaaggagctggccatgaccgccttcgggcggggcaacgacgcgctgctgcaaaagcgcatcgtggacggcgtggtgcgggatgtggccggagagaagcagcagtttcaggtgcagcggcaggacgagagccgtttccgactgcaaaacagccgccttgccgaccgcacggtaacggcggacgacccgctgcaccgcgcggagacgccccgccgccagccgctgggcgcaggtatggatcagctgcgccgcaaggcaatactggagcagaaatacttcggcaggacgtttgacgacaacatccacatccaactgatctacaacatattggacatccacaagatgctggctgtccccgccaaccacatcgtccacacgctgaatctgctgggcggatacggcgagacggactttgtggggatgctgcccgccgggctgccgtatgacaagctgagggtcgtgaaaaaaaagaacggcgacaccgtggacatcaaggcggatatcgccgcctatgccaagcggccgcagctggcctatctgggtgcggcgttctatgacgtgacccccggcaagagcaaaagggacgcggcgcggggcagagtcaagcgcgagcaggacgtgtatgccattctctcgctgatgagccttctgcggcagttctgcgcccacgacagtgtgcggatatggggacagaacaccaccgccgccctgtatcatttgcaggcgctgccgcaggacatgaaggatctgctggatgacggctggcgcagggcgctgggcggcgtcaacgaccatttcctcgacaccaacaaggtgaacctgctgaccctgttcgagtactacggcgccgagacgaagcaggcgcgggtggcgctgacgcaggacttctaccgcttcgtggtgctgaaggagcagaagaacatgggcttctccctgaggcgtctgcgggaggagctgctgaagctgccggacgccgcctacctcaccggtcaggagtacgactcggtgcggcagaagctgtatatgctgctggacttcctgctgtgccgcctctacgcgcaggagcgggccgaccgctgcgaggagctggtgtccgcgctgcgctgcgccttgtcggatgaggaaaaggacaccgtctatcaggcggaggccgccgcgctgtggcaggcgctgggcgacacgctgcgccggaagctgctgccgctgctgaaaggcaaaaagctgcaagacaaggacaagaagaagtcggatgagctggggctgtcccgtgacgtgctggatggtgtgctgttccgccccgcacagcagggcagccgcgccaacgccgactatttctgccggctgatgcacctgtccacatggttcatggacggcaaggagatcaacaccctgctgaccaccctcatcagcaagcttgagaatatcgacagcctgcggagcgtgctggagagcatgggactggcgtacagctttgtaccggcctacgccatgtttgaccacagccgctatatcgccggtcagctgcgggtggtcaacaacatcgcgcggatgcgtaagcctgccatcggcgccaagcgggagatgtaccgcgccgccgtggtgctgctgggcgtggacagcccggaggcagccgcggccatcaccgacgacctgctgcagatcgacccggaaacggggaaggtgcgcccccgcagcgacagcgcacgggacacgggtctgcggaacttcatcgccaacaacgtggtggaatcccgccgcttcacctacctgctgcgctacatgacgccggagcaggcgcgcgtgctggcgcagaacgaaaagctcatcgccttcgtgctgtccaccgtgcccgacacccagctggagcgctactgccgcacctgcgggcgggaggacatcaccggccgtccggcgcagatacgttacctgacggcgcagatcatgggcgtccggtatgagagcttcaccgatgtggagcagcgcgggagaggggataaccccaaaaaggagcggtacaaggctctcatcggcctgtacctgacggtgctgtatctggcggtgaagaatatggtcaactgcaacgcccgctacgtcatcgccttctactgccgtgaccgtgacacagcgctctatcagaaggaggtctgctggtacgatctggaggaggacaagaaaagcggcaagcagcggcaggtggaggactacaccgccctgacccgctattttgtgtcgcagggctatctgaaccgccatgcctgcggctatctgcgaagcaatatgaacggcatcagcaacagcctgctgaccgcctaccgcaacgcggtggatcacctgaacgcgatcccgccgctgggcagcctgtgccgggacatcggccgggtggacagctactttgccctgtaccactacgccgtgcagcagtatctgaacggcagatattacagaaagacgccccgcgagcaggagctgtttgccgccatggcgcagcataggacatggtgcagcgatctggtgaaggcactgaacaccccctttggctacaacctcgcccgctacaagaacctgtccattgacggtctgtttgaccgcgagggcgaccatgtggtgcgggaggacggcgaaaaaccggcggag

SEQ ID NO: 140 - DNA, 2835 bp, Artificial Sequence
  Anaerobic digester nCas1 sequence
aataacaaaagaaaaaccaaagctaaggcagctggactcaaatccgtttttttcgaccaaaagcaagctgttttgacgacttttgcaaaaggcaataattctcaaatcgaaaagaaggtcgtaaatagcgaggttaaggatttgcgacaaccacctgcttttgatctcgaacttaaagagaagactttttatatcagcggtaaaaacaacatcaatacctcaagagaaaacccattggcttccgcgtcgcttcctctaagcaagcgacaacgaattagagcagaaagaattaaacgggcgagagaggagaatcgcccctaccataacgtaaagagagtcggcgaagatgacttacgggcgaaagccgatttagagaagcactatttcggaaaagaatactctgacaatttaaaaattcaaataatctacaacattctcgatataaataagattatttccccctatattaatgatattgtttattctatgaataatcttgctcgtaacgacgagtatattgatggcaagattgatgttatcggcagtttaagctcgacgaccgattactcttcatttatgagtccaaataaggatttagaaaaagaaaaaaaattctcttttcatcgcgaaaactacaaaaaatttgtcgaagcctctaagccatatatgcgatattatggaaaagtttttattcgcgatgtcaaaaagagcaaactcagcaccggcaagggcgagaaaatcgaagtcatgtatcgctctgacgaggaaattttcacaatcttccaaatattaagttatgttcgtcaaagcatcatgcataatgatataggcaataagtcatcgattttagcaatcgaaaaatatcctgcccgctttgttgggttcttatcggacttgcttaaaacaaaaacaaatgatgtcaatagaatgttcatcgataataatagccagactaatttctgggtacttttttctatctttggtcttcaagatcatacgagcggcgcggacaaaatttgtcgtaatttttatgatttcgtcattaaagccgatagcaaaaacttaggtttttcacttaaaaaaatacgggaattaatgctcgatttgccaaatgccaatatgcttagagatcatcaatttgacactgttcgcagcaagttttacacactgcttgatttcatcatttaccagcactatttagaagaaaagtcgcgaatagacaatatggttgagaagttaagaatgactttaaaagaggaagaaaaggaagtgctttatgctgccgaggcaaaaatagtctggaacgccatcggggcgaaagtcataaacaagcttgttccgatgatgaatggcgacgcgctaaaagagattaaaaggaaaaacagagaccgcaaattgcctcaaagcgttatcgcaacggtccaagttaattcagacgctaacgtatttagtggcctgatatacttccttaccctctttttagacggcaaagaaattaatgaaatggtcagcaaccttattaccaaattcgaaaacattgatagtttactccatgttgatcgcgaaatttataaaagcgatgaaaaggatctcgatttagaaattgaaaaactcgcccttttctttaaaggtgtcgtgcgaccgaacgctaaaacggataccggcgccggagaaatatctaaatcattttcgatatttcaatccgccgaaagaattatcgaggagctgaagtttatcaaaaatgtgacgcggatggataatgaaattttcccatcagaaggagtgtttttagatgcggcaaatgtcttgggagttagaggcgacgacttcgatttttcaaacgaatttgtcggtgatgatttgcattctgacgccaataaaaaaattatcaataagatcaacggcaccaaagaagatcgcaatttgcgcaacttcataataaataatgttgtcaagtcgcggcgctttcaatatatcgcccgccacatgaacacacactatgttaaacaactcgccaacaacgaaactctcaaccgctttgtcttaaataaaatgggtgatgctaaaatcattaaccgctactacgaaagcatcagtggaaacactccaaatatcgaggttagaagccagatcgattatttggttaaacgtcttcggagtttcagttttgaagatctcaacgacgtaaaacaaaaagtgaggcccggcacaaatgaaagcatagaaaaggaaaagaaaaaagcgctagtgggtctttgcttaaccattcaatacttggtatataagaatctcgtcaatataaacgctcgttatacgactgctttctattgtcttgaacgggacagcaaacttaaaggctttggagttgatgtttggcgagattttgaaagctatacagccctgacaaatcactttattaaagagggctatcttcctgtccgcaaggcagaaattttacgagcgaatttaaaacatcttgattgcgaagatggatttaaatattatcgcaaccaagtcacacaccttaacgccatccgcgtagcatacaaatatattaacgaaattaaaagtgttcactcatatttcgcgctctatcattatattatgcaacgccacctatatgattctttgcaggcaaaggcaaaagattctagtggttttgttattgacgccttaaaaaagagttttgagcacaagatttactcgaaggatcttttgcacgttcttcattcgcccttcggttacaatacggcccgatacaaaaacttaagtatcgaggcattatttgacaaaaacgaaagccggcccgaggtgaatcctttatcgaccaacgat

SEQ ID NO: 141 - DNA, 2769 bp, Artificial Sequence
  Ruminococcus sp. CAG:57 nCas1 sequence
atggcaaaaaagaataaaatgaagcctagagagctgcgtgaggctcagaaaaaagccagacagctcaaagcggctgagataaataataacgctgctcctgcgatcgctgccatgcctgctgcagaggtcattgcacctgtggcagagaagaaaaaatcctccgtaaaggcggcaggaatgaagtctattcttgtcagcgaaaataaaatgtacataacctctttcggcaagggcaattctgctgtgcttgaatatgaggtggacaataatgactacaacaaaactcagctttcttcaaaggacaacagcaatatcgagcttggtgatgtaaacgaggtaaacatcactttttcaagcaagcatggctttgggagcggagtggagataaatacttcaaaccctactcacagaagcggtgaaagctcgcctgtaagaggggatatgctggggcttaaatcggagcttgaaaagcgctttttcggcaaaacttttgatgataatatacatatccagcttatttacaacattctggatatcgaaaagatacttgcggtgtatgtaacgaatatcgtttatgcgctgaacaatatgcttggtataaaggattctgaaagttatgatgattttatggggtatctttctgcaagaaatacttatgaagtttttactcaccctgacaaaagcaatctttccgataaggtaaagggtaatatcaagaaaagccttagcaagtttaatgacttgctgaaaactaagcgccttggctatttcggccttgaagagccaaagacaaaagacacaagagcttcggaagcatacaaaaagcgtgtttatcatatgcttgcaattgtggggcagataagacagtgtgtttttcatgataaatcgggtgcaaaaagatttgacctttacagttttattaacaatattgatcccgaatacagagatactcttgactatcttgttgaggagcgtttaaagtccataaacaaggactttatcgagggtaacaaggtcaatatcagcctgcttattgatatgatgaaaggctatgaggctgatgatatcatacgcctttattacgatttcattgtgcttaaatctcagaaaaatctcggcttttctatcaaaaagcttcgtgagaaaatgctggaggaatacggtttcagatttaaggacaagcaatatgactctgtgcgctcaaagatgtacaagcttatggatttcctgcttttctgcaactactacagaaatgacgttgccgcaggcgaagctcttgtgcgtaaactgcgtttttcaatgaccgatgatgaaaaagaggggatatatgctgatgaagcggcaaagctttggggcaaattcaggaatgattttgaaaatatcgccgaccacatgaacggtgacgttatcaaggagcttggcaaggctgacatggattttgatgagaaaattcttgacagtgaaaagaagaatgcgtctgaccttttgtatttctccaaaatgatatatatgctcacatattttcttgacggcaaggagataaacgatcttcttacaacgcttatcagcaagtttgataacatcaaggagtttttgaagataatgaaaagctctgctgttgatgttgagtgtgagcttacggcgggctacaagctgttcaatgacagccagaggataaccaacgagctttttatcgtaaagaacattgcttccatgagaaagcctgcggcttcagcgaagcttacgatgttccgtgacgcactgactatactcggtatagacgacaatatcacggacgataggataagcgagattctaaaacttaaagaaaaaggcaagggcatacatggtctgagaaattttataacaaacaatgttatcgagtcctctcggtttgtataccttatcaagtatgcgaacgctcagaagataagagaagtggctaaggatgagaaagttgtcatgtttgttcttgggggtatccctgacacgcagatagagcgttattacaagagttgtgtggagtttcctgacatgaatagttctttggaagcaaagcgcagtgagcttgcgagaatgataaagaacatcagctttgatgatttcaaaaatgtgaaacagcaggcaaagggcagagaaaacgtggctaaggagagggcaaaggctgttatcgggctttatcttacggtcatgtatctgctggtgaaaaatcttgtgaatgtcaatgcaaggtatgttattgcgatacactgccttgaacgtgattttgggctgtataaggagataattcctgagttggcttcaaagaacttgaaaaatgactacaggatactttcacagacgctttgtgaactttgtgatgatcgtaatgagtcgtcgaatttgttcttgaaaaagaacaagcggctgcgcaagtgcgttgaagttgatatcaataatgcagacagcagcatgacaagaaaataccgcaactgtattgctcatcttactgtagttcgtgaactgaaagaatacataggagatattcgtacagtggattcttacttctccatttatcattatgttatgcagcgttgtatcacgaaaaggggagatgacacaaagcaagaagagaaaataaagtatgaggacgatcttttaaaaaatcacggctatacgaaagactttgtaaaggctctcaactcgccgtttggatacaacattccgaggtttaaaaatctttcaattgagcagttgtttgacagaaatgaatatcttactgaaaagtag

SEQ ID NO: 142 - DNA, 2715 bp, Artificial Sequence
  Human codon-optimized Gut metagenome P1E0 nCas1
gaaagggaggtgaagaagcctcccaagaaatccctggccaaagccgccggactgaagtccacattcgtcatcagcccccaggaaaaggaactcgctatgaccgcctttggcagaggcaacgatgccctgctgcaaaagagaatcgtggacggcgtggtccgtgatgttgccggagagaaacagcagttccaggtccagaggcaagacgagagcagattcagactccaaaactccagactggccgataggaccgtcaccgctgacgaccccctccacagggctgaaacacccaggagacagcctctgggcgctggcatggatcagctgaggagaaaagccattctggagcaaaagtactttggcaggacattcgacgacaacatccacatccagctgatctacaacatcctggacatccacaagatgctggctgtgcctgctaaccatatcgtgcacaccctgaacctcctgggaggctacggcgaaactgattttgtgggaatgctgcctgccggactcccctacgataagctcagggtcgtgaagaaaaaaaatggcgataccgtcgacatcaaggccgacattgctgcctatgccaaaagaccccagctggcttacctgggagctgccttctatgacgtgacccctggaaaaagcaagcgtgatgctgccaggggcagggtgaagagggaacaggacgtctatgccattctgtccctcatgtccctgctgagacaattctgcgcccacgatagcgtcaggatctggggccagaataccaccgccgccctgtaccacctccaggccctgccccaggatatgaaggacctgctggacgacggctggaggagagctctgggaggcgtgaatgaccatttcctcgacaccaacaaggtgaacctcctcaccctcttcgagtactatggcgccgaaaccaagcaggctagggtggccctgacacaggacttttacaggttcgtggtgctgaaggagcagaagaacatgggctttagcctcaggaggctgagggaagagctgctgaagctgcccgacgccgcttacctgaccggacaggagtacgactccgtgaggcagaaactgtacatgctcctggacttcctgctgtgcaggctgtacgcccaggagagagccgatagatgcgaagagctggtgagcgccctcagatgtgctctgagcgacgaggagaaggatacagtctaccaagctgaagccgctgccctgtggcaagccctgggcgacacactcaggaggaaactcctccccctcctgaagggcaagaaactgcaagacaaggataagaaaaagtccgacgaactcggcctgtccagggatgtgctcgatggcgtgctctttagacctgcccagcagggcagcagagccaacgccgactacttttgtaggctcatgcacctgagcacctggtttatggacggcaaggagatcaataccctgctgaccaccctgatctccaagctggagaatatcgatagcctgaggtccgtcctggagtccatgggcctggcctatagctttgtccctgcctacgccatgtttgaccacagcagatacatcgctggccagctgagggtggtgaacaacatcgccagaatgaggaaacccgccattggagccaaaagagagatgtacagggccgctgtcgtgctgctcggagtggacagccccgaagctgctgccgccattacagacgatctgctgcagatcgatcccgaaactggaaaggttcgtcctagatccgactccgctagagacaccggactgaggaacttcatcgctaacaacgtcgtggagagcaggaggttcacctacctcctgagatacatgacccctgaacaggccagggtcctggctcaaaacgagaagctgattgccttcgtgctcagcacagtgcccgacacccagctggagaggtattgtaggacctgtggaagggaggacatcacaggcaggcccgcccagattaggtatctgaccgctcagatcatgggcgtgaggtacgaaagctttaccgacgtggaacagaggggaaggggcgataatcctaaaaaggagagatacaaggccctgatcggcctctacctgacagtgctgtatctggccgtcaaaaatatggtgaattgtaacgccaggtacgtgatcgccttctactgcagggatagggacaccgccctctaccagaaggaagtgtgttggtatgacctggaggaggacaagaagtccggaaagcaaagacaggtcgaggactatacagccctgaccagatatttcgtgtcccagggctacctgaacagacacgcctgcggctatctcaggtccaacatgaacggcatcagcaacagcctgctgaccgcctacagaaatgccgtggaccacctgaacgccattcctcctctgggctccctgtgtagggacatcggcagagtggattcctacttcgctctgtaccactacgccgtgcaacagtacctcaatggaaggtattacagaaaaacacccagagaacaggaactcttcgccgccatggctcagcacaggacctggtgttccgatctcgtgaaggccctgaacacccctttcggatacaacctggccaggtacaagaacctctccatcgacggactgttcgacagggagggcgatcatgtggtgagagaggatggcgaaaaacctgccgaa

SEQ ID NO: 143 - DNA, 2835 bp, Artificial Sequence
  Human codon-optimized Anaerobic Digester  nCas1
aacaacaagagaaaaacaaaggctaaagccgccggcctgaagagcgtttttttcgatcagaagcaggccgtcctgaccacattcgctaaaggcaacaacagccagatcgagaagaaggtggtcaatagcgaagtgaaggacctgagacagccccctgcctttgacctcgaactgaaagaaaaaactttttacatcagcggaaagaataatatcaacaccagcagagagaaccctctggccagcgccagcctgcctctgtccaaaaggcagaggattagggctgagaggatcaagagggccagagaggagaacaggccctaccacaacgtcaaaagggtcggcgaggatgatctgagggccaaagccgacctggagaagcattattttggaaaggaatacagcgataatctcaagatccagatcatttataacattctggacatcaataagatcatcagcccctacatcaatgacatcgtgtactccatgaacaatctggccaggaatgatgagtatatcgacggcaagatcgatgtgatcggttctctgtcctccaccacagactatagcagcttcatgagccccaataaggatctggaaaaggagaagaaattcagctttcacagagaaaactataaaaaatttgtcgaggcctccaagccctacatgagatattacggcaaagtctttatcagggacgtgaaaaaatccaagctgtccaccggcaagggcgaaaagatcgaggtgatgtacaggagcgatgaagagattttcaccatcttccaaatcctgtcctacgtgaggcagagcatcatgcataatgacattggcaacaagagcagcatcctcgccatcgaaaaataccccgccagattcgtgggcttcctgtccgacctcttaaaaactaagaccaacgacgtgaacaggatgttcatcgataacaatagccagacaaatttctgggtcctgttctccatcttcggcctccaggaccatacaagcggcgctgataagatctgcaggaacttctatgatttcgtgatcaaggccgacagcaagaacctgggattctccctgaaaaagatcagggagctcatgctggacctccctaacgctaacatgctcagggatcaccagttcgacacagtgaggagcaagttctataccctcctcgactttatcatttaccagcattacctggaagagaagagcaggatcgacaacatggtcgagaagctcaggatgaccctgaaagaagaggagaaggaggtgctctacgctgccgaagccaagatcgtgtggaatgccattggcgccaaggtcatcaacaagctggtgcctatgatgaacggtgatgctctgaaggagattaaaagaaagaacagggataggaagctgccccagtccgtgatcgctaccgtccaggtgaatagcgatgccaatgtgttttccggcctcatctacttcctcaccctcttcctggacggcaaagagattaacgagatggtgagcaatctcatcaccaagttcgagaatatcgactccctgctgcatgtggatagggagatctataagtccgacgagaaggacctcgacctcgaaatcgagaaactggctctgtttttcaaaggcgtggtcaggcccaacgccaaaacagacacaggagctggcgaaatcagcaagagcttcagcattttccagagcgccgagaggatcatcgaggagctgaaatttatcaagaatgtgacaaggatggacaacgagatctttcccagcgagggagtgttcctggatgctgccaatgtgctgggcgtgagaggagatgacttcgacttttccaacgagttcgtcggcgatgacctccactccgatgccaataaaaagatcatcaacaaaatcaatggcaccaaggaggacaggaacctcagaaacttcattattaataatgtggtgaagagcaggaggttccaatacatcgccaggcacatgaatacccactatgtgaagcagctggccaacaacgagacactgaacaggttcgtgctcaacaaaatgggcgacgccaagattatcaacaggtactatgagtccatcagcggcaacacccccaatatcgaggtcagatcccagattgactacctcgtcaaaagactcaggagcttctccttcgaggacctcaatgacgtgaagcaaaaagtcagacccggcaccaacgaatccatcgagaaggaaaagaaaaaggctctcgtcggactctgcctgacaatccaatatctggtgtacaaaaacctggtcaacatcaacgctaggtacaccacagccttctactgcctggaaagggattccaagctgaagggctttggcgtggatgtgtggagggatttcgagagctacaccgctctgaccaaccacttcatcaaggaaggctatctccccgtcaggaaggccgagattctgagagccaatctgaagcatctggactgcgaggacggcttcaagtattacagaaaccaggtcacccatctgaacgccatcagagtggcttataagtatattaacgaaattaagtccgtgcacagctactttgccctgtaccactacatcatgcagaggcacctctatgactccctccaagccaaagccaaggatagctccggcttcgtcattgacgccctgaagaagtccttcgaacataaaatctacagcaaagacctcctgcacgtgctccattcccctttcggctacaacaccgccaggtacaagaacctgagcatcgaggctctgttcgacaagaatgagagcaggcctgaagtcaaccccctctccaccaacgac

SEQ ID NO: 144 - DNA, 2898 bp, Artificial Sequence
  Human codon-optimized Ruminococcus flavefaciens XPD nCas1
atcgaaaaaaaaaagtccttcgccaagggcatgggcgtgaagtccacactcgtgtccggctccaaagtgtacatgacaaccttcgccgaaggcagcgacgccaggctggaaaagatcgtggagggcgacagcatcaggagcgtgaatgagggcgaggccttcagcgctgaaatggccgataaaaacgccggctataagatcggcaacgccaaattcagccatcctaagggctacgccgtggtggctaacaaccctctgtatacaggacccgtccagcaggatatgctcggcctgaaggaaactctggaaaagaggtacttcggcgagagcgctgatggcaatgacaatatttgtatccaggtgatccataacatcctggacattgaaaaaatcctcgccgaatacattaccaacgccgcctacgccgtcaacaatatctccggcctggataaggacattattggattcggcaagttctccacagtgtatacctacgacgaattcaaagaccccgagcaccatagggccgctttcaacaataacgataagctcatcaacgccatcaaggcccagtatgacgagttcgacaacttcctcgataaccccagactcggctatttcggccaggcctttttcagcaaggagggcagaaattacatcatcaattacggcaacgaatgctatgacattctggccctcctgagcggactgaggcactgggtggtccataacaacgaagaagagtccaggatctccaggacctggctctacaacctcgataagaacctcgacaacgaatacatctccaccctcaactacctctacgacaggatcaccaatgagctgaccaactccttctccaagaactccgccgccaacgtgaactatattgccgaaactctgggaatcaaccctgccgaattcgccgaacaatatttcagattcagcattatgaaagagcagaaaaacctcggattcaatatcaccaagctcagggaagtgatgctggacaggaaggatatgtccgagatcaggaaaaatcataaggtgttcgactccatcaggaccaaggtctacaccatgatggactttgtgatttataggtattacatcgaagaggatgccaaggtggctgccgccaataagtccctccccgataatgagaagtccctgagcgagaaggatatctttgtgattaacctgaggggctccttcaacgacgaccagaaggatgccctctactacgatgaagctaatagaatttggagaaagctcgaaaatatcatgcacaacatcaaggaatttaggggaaacaagacaagagagtataagaagaaggacgcccctagactgcccagaatcctgcccgctggccgtgatgtttccgccttcagcaaactcatgtatgccctgaccatgttcctggatggcaaggagatcaacgacctcctgaccaccctgattaataaattcgataacatccagagcttcctgaaggtgatgcctctcatcggagtcaacgctaagttcgtggaggaatacgcctttttcaaagactccgccaagatcgccgatgagctgaggctgatcaagtccttcgctagaatgggagaacctattgccgatgccaggagggccatgtatatcgacgccatccgtattttaggaaccaacctgtcctatgatgagctcaaggccctcgccgacaccttttccctggacgagaacggaaacaagctcaagaaaggcaagcacggcatgagaaatttcattattaataacgtgatcagcaataaaaggttccactacctgatcagatacggtgatcctgcccacctccatgagatcgccaaaaacgaggccgtggtgaagttcgtgctcggcaggatcgctgacatccagaaaaaacagggccagaacggcaagaaccagatcgacaggtactacgaaacttgtatcggaaaggataagggcaagagcgtgagcgaaaaggtggacgctctcacaaagatcatcaccggaatgaactacgaccaattcgacaagaaaaggagcgtcattgaggacaccggcagggaaaacgccgagagggagaagtttaaaaagatcatcagcctgtacctcaccgtgatctaccacatcctcaagaatattgtcaatatcaacgccaggtacgtcatcggattccattgcgtcgagcgtgatgctcaactgtacaaggagaaaggctacgacatcaatctcaagaaactggaagagaagggattcagctccgtcaccaagctctgcgctggcattgatgaaactgcccccgataagagaaaggacgtggaaaaggagatggctgaaagagccaaggagagcattgacagcctcgagagcgccaaccccaagctgtatgccaattacatcaaatacagcgacgagaagaaagccgaggagttcaccaggcagattaacagggagaaggccaaaaccgccctgaacgcctacctgaggaacaccaagtggaatgtgatcatcagggaggacctcctgagaattgacaacaagacatgtaccctgttcagaaacaaggccgtccacctggaagtggccaggtatgtccacgcctatatcaacgacattgccgaggtcaattcctacttccaactgtaccattacatcatgcagagaattatcatgaatgagaggtacgagaaaagcagcggaaaggtgtccgagtacttcgacgctgtgaatgacgagaagaagtacaacgataggctcctgaaactgctgtgtgtgcctttcggctactgtatccccaggtttaagaacctgagcatcgaggccctgttcgataggaacgaggccgccaagttcgacaaggagaaaaagaaggtgtccggcaattcc

SEQ ID NO: 145 - DNA, 2829 bp, Artificial Sequence
  Human codon-optimized Ruminococcus albus nCas1
gccaagaagtccaagggaatgtccctcagggagaagagggagctggagaagcaaaagaggattcagaaggccgccgtgaatagcgtgaacgatacccctgaaaaaactgaggaggctaatgtggtcagcgtgaacgtgagaaccagcgccgagaacaagcactccaaaaagagcgctgccaaagccctgggcctgaaaagcggcctcgtgattggagatgagctctacctgaccagcttcggaaggggcaacgaagccaagctggagaagaagattagcggcgacaccgtggagaaactgggaattggcgcctttgaggtcgccgaacgtgatgaaagcacactcacactcgagagcggcaggatcaaagacaaaaccgccaggcctaaggaccccagacatattaccgtggacacccagggaaagtttaaggaggacatgctgggcatcaggtccgtgctcgaaaagaagatctttggaaaaaccttcgacgataacatccacgtccagctggcctacaacatcctggacgtcgagaagatcatggctcagtatgtgagcgacatcgtctacatgctgcacaacaccgacaagaccgagaggaacgataacctgatgggatacatgtccattagaaatacctacaaaaccttctgcgacacatccaatctgcccgacgacacaaagcagaaggtggagaatcagaaaagggaattcgacaagatcattaagagcggcagactgggctacttcggcgaagctttcatggtcaacagcggcaactccaccaagctgaggcccgagaaagagatttatcatatcttcgccctcatggccagcctgaggcagagctacttccacggatacgtcaaggataccgactatcagggcacaacatgggcctacacactggaggataagctgaagggccccagccatgaatttagggagacaatcgacaagatctttgacgagggattcagcaagatctccaaggacttcggaaaaatgaacaaagtgaatctccaaatcctggagcagatgatcggcgagctgtacggaagcatcgaaaggcagaacctgacctgcgattactacgattttattcaactcaagaagcacaagtatctcggctttagcatcaagaggctgagagagacaatgctcgagacaacccctgccgagtgttataaggctgagtgctacaatagcgagaggcaaaagctctacaagctgatcgacttcctcatctacgacctctactataacaggaagcccgccagaatcgaagagatcgtcgacaagctgagagagagcgtcaacgacgaggagaaggagagcatctatagcgtggaggccaagtacgtgtatgagtccctgagcaaggtgctggataagagcctgaagaattccgtgtccggcgaaactatcaaggatctgcagaagaggtacgacgacgaaactgccaacagaatttgggacatctcccagcactccatttccggcaatgtcaactgcttctgcaagctgatctacattatgaccctcatgctggatggaaaggagatcaacgacctcctcaccaccctggtgaacaagtttgacaatattgcttcctttattgacgtgatggacgaactcggcctggaacacagctttacagacaactacaagatgtttgccgacagcaaggccatctgcctggacctgcaattcatcaatagctttgctagaatgagcaagatcgacgacgagaaaagcaagagacagctgttcagggatgctctggtgatcctcgatatcggaaacaaggacgaaacttggattaacaactacctcgactccgacatcttcaagctggacaaggaaggcaacaagctgaagggagccaggcatgactttaggaattttatcgccaataatgtcattaagtcctccagattcaagtacctcgtcaaatacagctccgccgacggcatgattaagttaaaaactaacgaaaagctgattggcttcgtgctcgacaagctccccgaaactcaaatcgataggtactacgaatcctgcggcctcgacaatgccgtcgtggacaagaaggtgaggatcgagaaactgtccggactcatcagggacatgaagttcgacgatttttccggcgtcaagacctccaataaggccggcgacaacgataagcaggacaaggccaagtaccaggccattatctccctgtacctgatggtgctctaccagattgtgaagaatatgatctacgtcaacagcaggtatgtgattgccttccactgcctggagagggacttcggaatgtacggcaaggatttcggcaagtactaccagggctgtaggaagctcaccgatcatttcatcgaggagaaatacatgaaggagggcaagctgggctgtaacaagaaagtcggcaggtacctgaagaataacatcagctgttgcaccgacggcctgattaacacctacaggaaccaggtcgatcatttcgccgtcgtcagaaaaatcggaaattacgccgcctacatcaaatccattggcagctggttcgagctctatcattacgtgattcagaggatcgtttttgacgaatatagattcgccctcaacaacaccgagtccaactataagaacagcatcattaagcaccatacatactgcaaggacatggtgaaggccctgaatacccctttcggctacgacctgcccagatataaaaacctgagcattggtgatttattcgacaggaacaactatctgaacaaaacaaaggagtccatcgatgccaactccagcattgatagccag

SEQ ID NO: 146 - DNA, 330 bp, Artificial Sequence
  processed Ruminococcus sp. CAG:57 CRISPR array
ctactacactggtgcgaatttgcactagtctaaaacaagctttttcttcattgtctacaaatgcaactactacactagtgcgaatttgcactagtctaaaactctatgtagcttttcttgtaaaacatatttctactacactggtgcgattttgcactagtctaaaactcatctgccttctgcatatcggacacttgactactacaccggtgcgaatttgcactagtctaaaacttacacctccttatgcgattttatcgtgcgctactacactggtgcgaatttgcactagtctaaaacttcatcttcaagaccgagcagggacatcat

SEQ ID NO: 147 - protein, 939 aa, Artificial Sequence
  Metagenomic hit (no protein accession): contig emb|OBVH01003037.1, human gut metagenome sequence (als o found in WGS contigs emb|OBXZ01000094.1| and emb|OBJF01000033.1|)
MAKKKRITAKERKQNHRELLMKKADSNAEKEKAKKPVVENKPDTAISKDNTPKPNKEIKKSKAKLAGVKWVIKANDDVAYISSFGKGNNSVLEKRIMGDVSSNVNKDSHMYVNPKYTKKNYEIKNGFSSGSSLVTYPNKPDKNSGMDALCLKPYFEKDFFGHIFTDNMHIQAIYNIFDIEKILAKHITNIIYTVNSFDRNYNQSGNDTIGFGLNYRVPYSEYGGGKDSNGEPKNQSKWEKRDNFIKFYNESKPHLGYYENIFYDHGEPISEEKFYNYLNILNFIRNNTFHYKDDDIELYSENYSEEFVFINCLNKFVKNKFKNVNKNFISNEKNNLYIILNAYGKDTENVEVVKKYSKELYKLSVLKTNKNLGVNVKKLRESAIEYGYCPLPYDKEKEVAKLSSVKHKLYKTYDFVITHYLNSNDKLLLEIVETLRLSKNDDEKENVYKKYAEKLFKADDVINPIKAISKLFARKGNKLFKEKIIIKKEYIEDVSIDKNIYDFTKVIFFMTCFLDGKEINDLLTNIISKLQVIEDHNNVIKFISNNKDAVYKDYSDKYAIFRNAGKIATELEAIKSIARMENKIENAPQEPLLKDALLSLGVSDDTKVLENTYNKYFDSKEKTDKQSQKVSTFLMNNVINNNRFKYVIKYINPADINGLAKNRYLVKFVLSKIPEEQIDSYYKLFSNEEEPGCEEKIKLLTKKISKLNFQTLFENNKIPNVEKEKKKAIITLYFTIVYILVKNLVNINGLYTLALYFVERDGYFYKDICGKKDKKKSYNDVDYLLLPEIFSGSKYREETKNLKLPKEKDRDIMKKYLPNDKDREKYNKFFTAYRNNIVHLNIIAKLSELTKNIDKDINSYFDIYHYCTQRVMFNYCKEKNDVVLAKMKDLAHIKSDCNEFSSKHTYPFSSAVLRFMNLPFAYNVPRFKNLSYKKFFDKQ

SEQ ID NO: 148 - DNA, 36 bp, Artificial Sequence
  DR sequence
gattgaaaggattgtaaatttgcaaggtcttaaaac

SEQ ID NO: 149 - protein, 958 aa, Artificial Sequence
  Metagenomic hit (no protein accession): contig tpg|DBYI01000091.1| (Uncultivated Ruminococcus flavefa ciens UBA1190 assembled from bovine gut metagenome)
MKKKIKARDLREAKKQEKLAAFSAKANTVYENEDKNVEAFPEALNLRSIKKSMNKAAGLKSTLIDGKSLYLTAFGKGNNAVVEHMIATDDSYSLKTLENEPSLKVKAADELKVTFMSRRPFVQESELSAVNPLHSGKDKPNKSAGQDMLGLKSELEKRYFGKIFDDNLHIQIIHNILDIEKIIAVYATNITAAIDHMVDDDNEQYLQGDFIGYMNTLNTYEVFMEPSKNPRLDSNARKNIENSREKFEYLLDTQRLGYLSLEYDKRSKDKRKSEEIKKRLYHLVAFAGQLRQWSFHSVEGLPRTWIYQLDNPKLAQEYRDTLDYFFNERFDAINKDFIETNNINLHILKEVFPAEDFQKLAALYYDFIVKKTFKNIGFSIKNLREQMLECDEAEKIRSKDMNSVRSKLYKLFDFCIFYQYFIDEERSRENVNYLRSTLNDEQKDAFYEEEGKRLWSENRKKFIYFCDNINKWVKNDYSDEVAKCIDLNEFRVNSNVSYFSKLLYAMSFFLDGKEINDLLTTLINKFDNIRSFIDTANFLNIDVKFTKDYDFFNIICDYAGELNIIKNIARMKKPSPSAKKNMYRDALTILGIPTEMSDEQLDAEIDKILEKKINPVTGKTEKGKNPFRNFIANNVIENKRFIYVIKFCNPKNVRKLVNNTKVTEFVLKRMPETQIDRYFESCIEGNLNPTTEKKIEKLAEMIKNIKFEEFRNVKQKVRDNSQEAVEKERFKAIIGLYLTVIYLLVKNLVNVNSRYVMAFHCLERDAKLYGVQNIGGDYLALTAKLCAEGDDYGKKLSEAKQNINQDKVQMPKNYFLARNKRWREAIEQDIDNAKKWFIGEKFNNVKNYRNNVAHLTAIRNCAEFIGEITKIDSYFALYHYLIQRQLAGRLDPNHPGFEKNYPQYAPLFKWNTYVKDMVKALNSPFGYNIPRFKDLSIDALFDRNEMKEETDDEKKIQT

SEQ ID NO: 150 - DNA, 36 bp, Artificial Sequence
  DR 1
gaactatacccctaccaaatggtcggggtctgaaac

SEQ ID NO: 151 - DNA, 37 bp, Artificial Sequence
  DR 2
tgaactacacccctgccaagtggttggggtctgaaac

SEQ ID NO: 152 - DNA, 36 bp, Artificial Sequence
  DR 3
gaactacacccctaccaagtggttggggtctgaaac

SEQ ID NO: 153 - protein, 877 aa, Artificial Sequence
  Metagenomic hit (no protein accession): contig tpg|DJXD01000002.1| (uncultivated Ruminococcus assembl y, UBA7013, from sheep gut metagenome)
MKKQKSKKTVSKTSGLKEALSVQGTVIMTSFGKGNMANLSYKIPSSQKPQNLNSSAGLKNVEVSGKKIKFQGRHPKIATTDNPLFKPQPGMDLLCLKDKLEMHYFGKTFDDNIHIQLIYQILDIEKILAVHVNNIVFTLDNVLHPQKEELTEDFIGAGGWRINLDYQTLRGQTNKYDRFKNYIKRKELLYFGEAFYHENERRYEEDIFAILTLLSALRQFCFHSDLSSDESDHVNSFWLYQLEDQLSDEFKETLSILWEEVTERIDSEFLKTNTVNLHILCHVFPKESKETIVRAYYEFLIKKSFKNMGFSIKKLREIMLEQSDLKSFKEDKYNSVRAKLYKLFDFIITYYYDHHAFEKEALVSSLRSSLTEENKEEIYIKTARTLASALGADFKKAAADVNAKNIRDYQKKANDYRISFEDIKIGNTGIGYFSELIYMLTLLLDGKEINDLLTTLINKFDNIISFIDILKKLNLEFKFKPEYADFFNMTNCRYTLEELRVINSIARMQKPSADARKIMYRDALRILGMDNRPDEEIDRELERTMPVGADGKFIKGKQGFRNFIASNVIESSRFHYLVRYNNPHKTRTLVKNPNVVKFVLEGIPETQIKRYFDVCKGQEIPPTSDKSAQIDVLARIISSVDYKIFEDVPQSAKINKDDPSRNFSDALKKQRYQAIVSLYLTVMYLITKNLVYVNSRYVIAFHCLERDAFLHGVTLPKMNKKIVYSQLTTHLLTDKNYTTYGHLKNQKGHRKWYVLVKNNLQNSDITAVSSFRNIVAHISVVRNSNEYISGIGELHSYFELYHYLVQSMIAKNNWYDTSHQPKTAEYLNNLKKHHTYCKDFVKAYCIPFGYVVPRYKNLTINELFDRNNPNPEPKEEV

SEQ ID NO: 154 - DNA, 36 bp, Artificial Sequence
  DR
caactacaaccccgtaaaaatacggggttctgaaac

SEQ ID NO: 155 - protein, 984 aa, Artificial Sequence
  Metagenomic hit (no protein accession): contig OGZC01000639.1 (human gut metagenome assembly)
MKKKNIRATREALKAQKIKKSQENEALKKQKLAEEAAQKRREELEKKNLAQWEETSAEGRRSRVKAVGVKSVFVVGDDLYLATFGNGNETVLEKKITPDGKITTFPEEETFTAKLKFAQTEPTVATSIGISNGRIVLPEISVDNPLHTTMQKNTIKRSAGEDILQLKDVLENRYFDRSFNDDLHIRLIYNILDIEKILAEYTTNAVFAIDNVSGCSDDFLSNFSTRNQWDEFQNPEQHREHFGNKDNVICSVKKQQDLFFNFFKNNRIGYFGKAFFHAESERKIVKKTEKEVYHILTLIGSLRQWITHSTEGGISRLWLYQLEDALSREYQETMNNCYNSTIYGLQKDFEKTNAPNLNFLAEILGKNASELAEPYFRFIITKEYKNLGFSIKTLREMLLDQPDLQEIRENHNVYDSIRSKLYKMIDFVLVYAYSNERKSKADALASNLRSAITEDAKKRIYQNEADQLWTSYQELFKRIRGFKGAQVKEYSSKNMPIPIQKQIQNILKPAEQVTYFTKLMYLLTMFLDGKEINDLLTTLINKFDNISSLLKTMEQLELQTTFKEDYTFFQQSSRLCKEITQLKSFARMGNPISNLKEVMMVDAIQILGTEKSEQELQSMACFFFRDKNGKKLNTGEHGMRNFIGNNVISNTRFQYLIRYGNPQKLHTLSQNETVVRFVLSRIAKNQRVQGMNGKNQIDRYYETCGGTNSWSVSEEEKINFLCKILTNMSYDQFQDVKQSGAEITAEEKRKKERYKAIISLYLTVLYQLIKNLVNINARYIIAFHCLERDAILYSSKFNTSINLKKRYTALTEMILGYETDEKARRKDTRTVYEKAEAAKNRHLKNVKWNCKTRENLENADKNAIVAFRNIVAHLWIIRDADRFITGMGAMKRYFDCYHYLLQRELGYILEKSNQGSEYTKKSLEKVQQYHSYCKDFLHMLCLPFAYCIPRYKNLSIAELFDRHEPEAEPKEEASSVNNSQFITT

SEQ ID NO: 156 - DNA, 33 bp, Artificial Sequence
  DR 1
actacaatccatggttatcgtggatactaaaac

SEQ ID NO: 157 - DNA, 33 bp, Artificial Sequence
  DR 2
actacaatccacgtttatcgtggatactaaaac

SEQ ID NO: 158 - protein, 978 aa, Artificial Sequence
  Metagenomic hit (no protein accession): contig emb|OHBM01000764.1(human gut metagenome assembly)
  SITE (1)..(222): Xaa is any amino acid
XXXXXXXXXXXXXXXXXXXXXXXXXXXXXXXXXXXXXXXXXXXXXXXXXXXXXXXXXXXXXXXXXXXXXXXXXXXXXXXXXXXXXXXXXXXXXXXXXXXXXXXXXXXXXXXXXXXXXXXXXXXXXXXXXXXXXXXXXXXXXXXXXXXXXXXXXXXXXXXXXXXXXXXXXXXXXXXXXXXXXXXXXXXXXXXXXXXXXXXXXXXXXXXXXXXXXXXXXXXXXXHPLQKRYRYLTSTNLKSFETYKNNLVNKKKFDLDRVKKIPQLAYFGSAFYNTPEDTSAKITKTKIKSNEEIYYTFMLLSTARNFSAHYLDRNRAKSSDAEDFDGTSVIMYNLDNEELYKKLYNKKVHMALTGMKKVLDANFNKKVEHLNNSFIKNSAKDFVILCEVLGIKSRDEKTKFVKDYYDFVVRKNYKHLGFSVKELRELLFANHDSNKYIKEFDKISNKKFDSVRSRLNRLADYIIYDYYNKNNAKVSDLVKYLRAAADDEQKKKIYLNESINLVKSGILERIKKILPKLNGKIIGNMQPDSTITASMLHNTGKDWHPISENAHYFTKWIYTLTLFMDGKEINDLVTTLINKFDNIASFIEVLKSQSVCTHFSEERKMFIDSAEICSELSAMNSFARMEAPGASSKRAMFVEAARILGDNRSKEELEEYFDTLFDKSASKKEKGFRNFIRNNVVDSNRFKYLTRYTDTSSVKAFSNNKALVKFAIKDIPQEQILRYYNSCFGASERYYNDGMSDKLVEAIGKINLMQFNGVIQQADRNMLPEEKKKANAQKEKYKSIIRLYLTVCYLFFKNLVYVNSRYYSAFYNLEKDRSLFEINGELKPTGKFDEGHYTGLVKLFIDNGWINPRASAYLTVNLANSDETAIRTFRNTAEHLEALRNADKYLNDLKQFDSYFEIYHYITQRNIKEKCEMLKEQTVKYNNDLLKYHGYSKDFVKALCVPFGYNLPRFKNLSIDALFDKNDKREKLKKGFED

SEQ ID NO: 159 - DNA, 36 bp, Artificial Sequence
  DR
gaactacagccctccttaaatggggggttctaaaac

SEQ ID NO: 160 - protein, 1023 aa, Artificial Sequence
  Metagenomic hit (no protein accession): contig emb|OHCP01000044.1(human gut metagenome assembly)
MAKKITAKQKREEKERLNKQKWAKNDSVIIVPETKEEIKTGEIQDNNRKRSRQKSQAKAMGLKAVLSFDNKIAIASFVSSKNAKSSHIERITDKEGTTISVNSKMFESSVNKRDINIEKRITIEEPQQDGTIKKEEKGVKSTTCNPYFKVGGKDYIGIKEIAEEHFFGRAFPNENLRVQIAYNIFDVQKILGTFVNNIIYSFYNLSRDEVQSDNDVIGMLYSISDYDRQKETETFLQAKSLLKQTEAYYAYFDDVFKKNKKPDKNKEGDNSKQYQENLRHNFNILRVLSFLRQICMHAEVHVSDDEGCTRTQNYTDSLEALFNISKAFGKKMPELKTLIDNIYSKGINAINDEFVKNGKNNLYILSKVYPNEKREVLLREYYNFVVCKEGSNIGISTRKLKETMIAQNMPSLKEENTYRNKLYTVMNFILVRELKNCATIREQMIKELRANMDEEEGRDRIYSKYAKEIYLYVKDKLKLMLNVFKEEAEGIIIPGKEDPVKFSHGKLDKKEIESFCLTTKNTEDITKVIYFLCKFLDGKEINELCCAMMNKLDGISDLIETAKQCGEDVEFVDQFKCLSKCATMSNQIRIVKNISRMKKEMTIDNDTIFLDALELLGRKIEKYQKDKNGDYVKDEKGKKVYTKDYNNFQDMFFEGKNHRVRNFVSNNVIKSKWFSYVVRYNKPAECQALMRNSKLVKFALDELPDSQIEKYYISVFGEKSSSSNEEMRRELLKKLCDFSVRGFLDEIVLLSEDEMKQKDKFSEKEKKKSLIRLYLTIVYLITKSMVKINTRFSIACATYERDYILLCQSEKAERAWEKGATAFALTRKFLNHDKPTFEQYYTREREISAMPQEKRKELRKENDQLLKKTHYSKHAYCYIVDNVNNLTGAVANDNGRGLPCLSEKNDNANLFLEMRNKIVHLNVVHDMVKYINEIKNITSYYAFFCYVLQRMIIGNNSNEQNKFKAKYSKTLQEFGTYSKDLMWVLNLPFAYNLPRYKNLSNEQLFYDEEERMEKIVGRKNDSR

SEQ ID NO: 161 - DNA, 36 bp, Artificial Sequence
  DR
gtactaaagcccgctagtatagacgggttctaagac

SEQ ID NO: 162 - protein, 926 aa, Artificial Sequence
  Metagenomic hit (no protein accession): contig emb|OGDF01008514.1| (human gut metagenome assembly)
MTETKPKREDIAKTPAAKSRSKAAGLKSTFAVNGSVLLTSFGRGNDAVPEKLITEKAVSEINTVKPRFSVEKPATSYSSSFGIKSHISATADNPLAGRAPVGEDAIHAKEVLEQRVFGKTFSDDNIHIQLIYNILDIRKILSTYANNVVFTINSMRRLDEYDREQDYLGYLYTGNSYERLLDIADKYAVDGEDWRNTAAGISNDFEKKQFQTINGFWDLLDMIEPYMCYFSEAFFCETTVKDPDSGRIVPCLEQRSDGDIYNILRILSIVRQTCMHDNASMRTVMFTLGQNSVRDRKNGFDELAELLDYLYDEKIDIVNRDFLRNQKNNIELLSRIYGSSADSPERDRLVQNFYDFRVLSQDKNLGFSIKKLREKLLDSPALSVVRSKKYDTMRSKIYSLIDFMIYRKFSENHVAVDDFVEELRSLLTEDEKESAYSRWAETLINDGFAQEILVKLLPQTDPAVIGKIKGKKLLNDSIAGIKLKKDASFFTKIINVLCMFQDGKEINELVSSLVNKFANIQSFVDVMRSQGIDSGFTADYAMFAESGRISRELHILKGIARMQHSIAGLGDVKIYGSDDKFHGVSRRVYTDAAYILGFGERSEDNDGYVDDYVSSKLLGGADKNLRNFITNNVIKNRRFLYTVRYMNPKRAKKLVQNDALVVLALSGIPETQIDRYYKSCIEKRSFNPDLNEKIAALSEMITTLKIDDFEDVKQNPEKNANYEAKKNQRISKERYKACIGLYLTVLYLICKNLVKINARYSIAIGCLERDTQLHGVDFKGAAYMTRDVFIAKGWINPKKPTVKSIKEQYAFLTPYIFTTYRNMIAHLAAVTNAYKYIPQMDRFKSWFHLYHTVIQHSLIQQYEYDRDYGRKGAPVVSERVLQLLEQCREHSNYSRDLLHILNLPFGYNLPRYLNLSSEKYFDANAI

SEQ ID NO: 163 - DNA, 36 bp, Artificial Sequence
  DR
ctactacactggtgcgaatttgcactagtctaaaac

SEQ ID NO: 164 - protein, 1030 aa, Artificial Sequence
  Metagenomic hit (no protein accession): contig emb|OGPN01002610.1(human gut metagenome assembly)
MAKKITAKQKREEKERLNKQKWAKQDTPVVPKSKTEEKPVAASDDKLLKTTQVKKVQTKSKAKAMGLKTVLSFDDKIAIASFVNDKKTKLPHIERITDKSGTTIHENARMFDSSVDEQNVNIEKRMTIEEKQNDGTFKKDEKDVKATICNPYFKTCGKDYIGIKDVAEKYFFGKTFPNENLRVQIAYNVFDIQKILGTYVNNIIYSFYNLRRDGKSDVDIIGSLYAFADFDNQLKDKPAFREAKDLLKNTEAYFSYFGDVFKKSKKGKKDENNEDYEKNLRHNFNVLRVLSFLRQICTHAYVKCTGGAKNNGDSTKVEAESLDALFNITEYFAKTAPELSKTINEIYKEGIDRINNDFVTNGKNNLYILSKVYPDMQRNELVKKYYQFVVCKEGNNVGINTRKLKESIISQHPWITTPQDNNKANDYESCRHKLYTIMCFILVAELDAHESIRDNMVAELRANMDGDDGRDAIYEKYAKDIYHIVKDKLLAMQKVFDEELVPVKVEGKNDPQQFTHGKLGKKEIESFCLSDKNTSDIAKVVYFLCNFLDGKEINELCCAMMNKFDGIGDLIDTAKQCGEEVKFIEEFACLSNCRKITNDIRVAKSISKMKNKVNIDNDIIYLDAIELLGRKIEKYQKDENGKILLGTDGKRLYTQEYKYFNDMFFNAGNHKVRNFIANNVMQSKWFFYVVRYNKPAECQIIMRNKTLVKFTLDDLPDMQIQRYYSSVFGDNNMPAVDEMRKRLLDKINQFSVRGFLDELDEIVLMSDEESKRNKSSEKEQKKSLIRLYLTIAYLITKSMVKINTRFSIACAMYERDYALLCQSEMKGGPWDGGAQALAVTRKFLNHDREVFDRYCAREAEIARLPSEERKPLRKANDKLLKQTHYTNHSYTYIVNNLNSFTDIDYCAKDVGLPAPNDKNDNASILGEMRNDIAHLNIVHDMVKYIEELKDISSYYAFYCYVLQRRLVGKDPNCQNKFKAKYAKELNDYGTYNKNLMWMLNLPFAYNLPRYKNLSSEFLFYDMEYNKKDDE

SEQ ID NO: 165 - DNA, 35 bp, Artificial Sequence
  DR
gaacccgtctatactagcgggctttagtacaaaac

SEQ ID NO: 166 - protein, 1001 aa, Artificial Sequence
  Metagenic hit (no protein accession): contig NFIR01000008.1 (Eubacterium sp. An3, from chicken gut me tagenome)
MAKKLRPKELREKRRMAEKEEHKKQEKLRKEQEELRKKQEKQREDQKELEKIKKEEGGEGEKKKSGAKALGLKSTFILDRDEQKMLMTSFGRGNKAVRDKYIIGDKVSDIDDSWENKKAALSVEVCGKSFNISKKENDDCEPVKVNNPVLSGNKKDDDLIHCRKNLEEMYFGQQFKDNIHIQLIYNILDIEKILAVQINNIVFILNNLLRWSGEEEFDLIGSLGVNHTYEEFRGRNKNYGKFSELIKQSQMRYFGSTFCLFNENEERITSENKKEWKRFEKKCYHLLAVLGMMRQATAHGDSKRRAEIYKLGKEFDRLEARGCRPEARKELDELYKKKIHEMNQGFLKNSKSDILMLFRIYNAESKEAKRKLAQEYYEFIMLKSYKNTGFSIKHLRETMIDKMDEDKKEKLKDDKYNPIRRKIYRIMDFMIYQYYQEPEHQEEAEELVRKLRNAEIEAKKELAYRKEAEKLKKELEKIIFNSVLPSCDRILSEMDERRNKKVNQESSDTDKEEPLDSEIAEGITFIKETAHSFSEMIYLLTVFLDGKEINILLTQLIHCFDNISSFMDTMEEENLLTKLKEDYEIFEESKEISRELRIINSFARMTEPVPKTERIMFIEAAQILGYSNGEKELEGYVDALLDTKNKTNDKKKKGFVRYIWNNVIKSTRFRYLVRYADPKKVRAFAANKKVVAFVLKDIPDDQIRAYYNSCFRQNSDSSSNNSNASWDADSNKRDISVSDMRKALTEKITGLNFGDFEEESKKGIRKEESDKNIIRLYLTVLYLVQKNLIYVNSRYFLAFHCAERDEMLYNGETIDNNKEKGSEKDWRKFAKQFIMEHSPKKKVKDYLAKNFEYSNKWSLKEFRNSVQHLNVIRDAHKYIKYINDNKDVQSYFALYHYLVQRYISERAANRTDKESLSEGRLQYYLSQVKEYRTYCKDFVKALNVPFAYNLPRYKNLSIDELFDRNNYLPNKAKKWIPEKKENGEYVMEDCGNKDAGQVENA

SEQ ID NO: 167 - DNA, 35 bp, Artificial Sequence
  DR
gaactacactctggctgaaagtcagggtctaaaac

SEQ ID NO: 168 - protein, 1006 aa, Artificial Sequence
  Metagenomic hit (no protein accession): contig NFLV01000009.1 (Eubacterium sp. An11, from chicken gut metagenome)
MSKKQRPKDIRKRQEEEKREKYKKQEELRKKQEELRKEQEQRREDQKELEKIKKEVGEEGEKKKSRAKALGLKSTFILDRDEQKVLMTSFGQGNKAVRDKYIIGDKVSDINDDRKNKKAALLVEVCGKSFNISKKENDDCDPVKVNNPVVSRNKKDDDLIHCRKKLEELYFGEQFKDNIHIQLIYNILDIEKILAVQVNNIVFALNNLLSWSGEEKFDLIGYLGVNDTYEKFRDAKGKRKGLYEKFSTLIEKKRMRYFGSTFYPLNEKGEEITSNDKKEWEQFEKKCYHLLAVLGMMRQATAHGDSKRRAEIYKLGKEFDKSEARGCRQEARKELDDLYRKKIHEMNQSFLKNSKRDILMLFRIYDAESKEAKRKLAQEYYEFIMLKSYKNTGFSIKHLRETVIDKMDEDIKEKIKDDKYNPIRRKLYRIMDFVIYQYYQESEQQEEAMELVRKLRNAETKVEKELTYRKEAEKLKEELEKIIRNSILSVCDRILAEMNEKRHKKVNQESSDTDSEEPLDPEISEGITFIKETAHSFSEMIYLLTVFLDGKEINILLTQLIHCFDNISSFMDTMKEENLLTKLKEDYEIFEESKEISKELRIINSFARMTEPVPKTEKTMFIDAAQILGYSNDEKELEGYVDALLDTKNKTKDKERKGFEKYIWNNVIKSTRFRYLVRYADPKKVRAFAANKKVVAFVLKDIPDEQIKAYYNSCFSQNSDSSSNMSIAFQDGDSNKKGTSVHDMMRKALTEKITGLNFGDFEEESKKGIRREESDKNIIRLYLTVLYLVQKNLIYVNSRYFLAFHCAERDEVLYNGETIDNNKEKGSEKDWKKFAKEFIIEHPPKKKVKDYLAKNFEYSNKWSLRVFRNSVQHLNVIRDAYKYIKCIDDNKDVQSYFALYHYLVQRYISEMAENLTDKGELSEGRLQYYLSQVENYRTYCKDFVKALNVPFAYNLPRYKNLSIDELFDRNNYLPNKAKKWISEKKENGEYVMEDCGNKGAGQVENA

SEQ ID NO: 169 - DNA, 35 bp, Artificial Sequence
  DR
gaactacaccctggctgaaagtcagggtctaaaac

SEQ ID NO: 170 - protein, 1027 aa, Artificial Sequence
  Metagenomic hit (no protein accession): from contig emb|OBLI01020244 and emb|OBLI01038679 (from pig g ut metagenome)
MAKKITAKQRREERERQNKQKWAKKQADATAVFECEADIKPADSKDEDCTNIYIKREKKKTQAKAMGLKTVLGFDNKIAIASFMSSKDSKSSHIERITDPNGKTIREDVRMFDSNVDECSINLEKRMTVEERQKDGTIKKDEKDVKSTICNPYSNECGKDYIGIKSVAEELFFGRTFPNDNLRVQIAYNIFDIQKILGTYINNIIYSFYNLSRDESQSDNDVIGTLYMLKDFDGQKETDTFRQARALLERTEAYYSYFDNVFKKIDKNKKKSDDCKRERNEILRYNFNVLRVLSFLRQICAHAQVKISNEHDREKGGGLVDSLDALFNISRFFDAVAPELNEVINSVYSKGIDDINDNFVKNGKNNFYILSKIYPEVAREDLLREYYYFVVSKEGNNIGISTKKLKEAIIVQDMSYIKSEDYDTYRNKLYTVLCFILVKELNERTTIREQMVADLRANMNGDIGREDIYSKYAKIIYAQVKPRFDTMKSAFEEEAKDVIVPDKKKPVKFSHGKLDKNEIERFCITSANTDSVAKIIYFLCKFLDGKEINELCCAMMNKLDGINDLIETAEQCGAKVEFVDKFSVLSNCETISDQIRIVKSISKMKKEIAIDNDTIFLDALELLGRKIDKYKKDATGKYLKDENGKYLYSKEYDDFQYMFFKDSHRVRNFISNSVIKSKWFSYIVRYNQPSECRAIMKNKTLVKFALDELPDLQIQRYFVALYGDEDLPSYGEMRKILLKKLHDFSIKGFLDEIVLLSDLDMESQDKYCEKEQKKSLFRLYLTIAYLITKSMVKINTRFSIACATYERDYALLCASNKQERAWSSGATALALTRRFLNQDKLIFEKHYAREGEISKLPKEERKAMRKVNDQLLKRTHFSKHSYCYIVDNVNRLTGGECRTDKRVLPVLNEKNDNAGILLDFRKTIAHLNVVHKMVDYVDEIKGITSYYAFFCYVLQRMLVGNNLNEKNAIKEKYSATVKSFGTYSKDFMWLINLPFAYNLPRYKNLSNEQLFYDEEERNETEEQIDRL

SEQ ID NO: 171 - protein, 39 aa, Artificial Sequence
  Motif 1
  SITE (3)..(7): Xaa is any amino acid
  SITE (9)..(9): Xaa is any amino acid
  SITE (11)..(33): Xaa is any amino acid
  SITE (35)..(39): Xaa is any amino acid
NVXXXXXFXYXXXXXXXXXXXXXXXXXXXXXXXLXXXXX

SEQ ID NO: 172 - protein, 33 aa, Artificial Sequence
  Motif 2
  SITE (2)..(6): Xaa is any amino acid
  SITE (8)..(10): Xaa is any amino acid
  SITE (12)..(16): Xaa is any amino acid
  SITE (18)..(28): Xaa is any amino acid
  SITE (31)..(33): Xaa is any amino acid
LXXXXXYXXXKXXXXXNXXXXXXXXXXXRDXXX

SEQ ID NO: 173 - protein, 19 aa, Artificial Sequence
  Motif 3
  SITE (5)..(16): Xaa is any amino acid
  SITE (18)..(19): Xaa is any amino acid
KEINXXXXXXXXXXXXIXX

SEQ ID NO: 174 - protein, 18 aa, Artificial Sequence
  Motif 4
  SITE (3)..(3): Xaa is any amino acid
  SITE (5)..(7): Xaa is any amino acid
  SITE (9)..(11): Xaa is any amino acid
  SITE (13)..(17): Xaa is any amino acid
PFXYXXXRXXXLXXXXXF

SEQ ID NO: 175 - protein, 979 aa, Artificial Sequence
  Metagenomic hit (no protein accession): contig OJMM01002900 human gut metagenome sequence
MGKHLNAKQRKLEKKLKNQQKDMMYTKSTDAVSVPTLKAAPTKAEMSQDTAEASTLITPGTLKTKAKAMGLKSTLVFDDKIVVTSFLNSKTEENEKCAHIEKIADCNGQTIVERPRMFNTSINAKKVDLSKDNDETNYPNPAFEDCGRDYINVKSALEKRVFGKTYNKDNLHVQIAYNIFDIKKIIGAYINNIIYIFYNLGREEYDAKKDIIGTQDSAYISKILNNTSAYFTYFDGVFKQITDRDSNKDREIKNSYNALVLKVLYYLRQFCMHGNTYTKRNEESFLSDTALYNAKEFFAKADPQINELIDAVYADGIKTINSDFMAHAKNNMYIICEVYKNEAEDSLMKEYYDFVVRKEGNNLGFNTRQLREILIDKYVGNLRGKKYNTFRNKLYTVLGFILVKEIKRNPKIQDSFIAKLRANQNGDEGKLNIYNEFAPKIWSVVSSKLNSAITCFDEESLSKFKGYKDIDESLISRYGITVANTDTLVKILYFLCKFLDGKEINELCCAMINKFDNINDLIKTAAQCGEDIEFVKEYKLFINSNDLSDQIRIVKSISKMKPELSKIGEALILDAIDILGYKINKYKYDAAGNRLVDSNNKPVYSEEYCAFKKDFFETCELDEFGRVKYNKKGKPVINHRRRNFIINNVLSSKWFFYVAKYNRPSECQKFMKSKKLIALVLKDVPETQIARYYQSVTGGRTQANSEAMRMTLIKLLHEFSIKNVLSDVGTMTASENKRQIENSRKERMKAIVKLYLTVVYLIAKSLVKVNTRFSIAFSAYERDVSLLADENELIALANNEDDKWKKGNYVFALTKHFWDNDEPYFDKYNNALQQIRSIVDPNERRLAYRANDKVVKHTHFNLHSYKYVKHNYEEISKASKIITAYRNNVQHLNVMNSITKYLGDISEVTSYYSLYCYTLQRLLLDDNNNDKFASIKGNLRKFGIYNKDFMWLLNIPFAYNLPRYKNLSNEEIFYDELQK

SEQ ID NO: 176 - DNA, 36 bp, Artificial Sequence
  Direct repeat
gtacaatagccctctcgtagttgagggctctgagac

SEQ ID NO: 177 - protein, 1009 aa, Artificial Sequence
  Metagenomic hit (no protein accession): contig ODAI011611274.1 gut metagenome sequence
MKKKISLKEQRNTKKAENKLKYQKAQAERAAAAQQTAAGAESEENPCFDVVKDTKRKALNPLHVEIEAPSAKKSSVKANGLKSLLLTDGKTVMTSFGRGSEANVEKRFDETGTKTFDRDPELFSAKPLETGYRIQRFNASPKDAGLAYRPAGVRPDQIGAKAALEKRYFGKETPGDNIHVQIAYQIQDIEKLLAVYISNIIYAVNNVTGVSAMKDSKGRPVDLLGDYGILGEEGLTKRLQRIPEQADEEAKALQAFLCSERLSYFGKEFCLVRNSPKQPDKEEKRQYKLMRVLCLLGELRQFLVHGKKKEKEFAWLYRLDRQLSQEYRKLLGEFYDAQVDKVNKSFLTNSTVNLEVLFRALKTGTDPERKTVTQEYYQFTVRKEDGNLGFSLKTLREILLSAYKHEVRDKEYDSIRHKLYQLFSFALYHYYKTGVGAERREAFVAKLRAVMTAEAKQRAYADEAAEIWNDEGSGIRAAFLEILEAVDFGSAVKGIKARSSVAGDKRFAEWLEEVRIRPEGVSCFTKLMYLLTRFLDGKEINELLTGLINKLENIQSFLDVMQQEHAETGLSDAFSFFEYSGEIAAELRMTRSFARMAAADPEAKRFMVVDGAKLLGFNPKDTESEDEGIIRAIYGDACAEYLQFSEEEKEAFYVQEGLYGKEREKFSPYAYFHTDTSLRNFIAKNVVESARFRYVIRYVSPEIARKYARQEALVRFALHRVPLLQLRRYYQSCCGPKKDPDAAECVDFLAGVVNRVDFANFTDVRTGDSSKSEQEKKQKYQAIVGLYLTVVYWIVKNLVNVNSRYVMAFHILERDTVLLEGKRLFVGGMKAEDPFLLTDGYVSRQDAYVRKRIGENKRANRHGLNCVLENRNALGSDPASTDAAASLIWSYRNAAAHLTAVAAAQEYVSELREIHSYFEVYHYAMQRYLKSGAEFAELVSKNGPASGKIAAWANAVDRCHSFCKDWLWLLNVPFAYNPARYKNLSIANLFDKNEAAPVTEDASEQKEDE

SEQ ID NO: 178 - DNA, 36 bp, Artificial Sequence
  Direct repeat
gtactacacccctgcagttttgcaggggtctgaaac

SEQ ID NO: 179 - protein, 961 aa, Artificial Sequence
  Metagenomic hit (no protein accession): contig OIZX01000427.1
MAKKKKTARQLREEMQQQRKQAIQKQQEQRQEKAAAARETAAPEQPAAAPVPKRQRKSLAKAAGLKSNFILDPQRRTTVMTAFGQGSTAILEKQIVDRAISDLQPVQQFQVEPASAAKYRLKNSRVRFPNVTADDPLYRRKDGGFVPGMDALRRKNVLEQRFFGKSFADNIHIQMIYSILDIHKILAAASGHIVHLLNIVNGSKDRDFIGMLAAHVLYNELNEEAKRSIADFCKSPRLIYYSAAFYETLDNGKSERRSNEDIFNILALMTCLRNFSSHHSIAIKVKDYSAAGLYNLRRLGPDMKKMLDTFYTEAFIQLNQSFQDHNTTNLTCLFDILNISDSARQKQLAEEFYRYVVFKEQKNLGFSVRKLREEMLLLPDAAVIADKRYDTCRSKLYNLMDFLILRVYRTGRADRCDKLPEALRAALTDEEKAVVYHKEALSLWNEMRTLILDGLLPQMTPENLSRLSGQKRKGELSLDDAMLKECLYEPGPVPEDAAPEEANAEYFCRMIYLATLFMDGKEINTLLTTLISKFENIAAFLQTMEQLNIEAELGPEYAMFTRSRAVAEQLRVINSFALMKKPQVNAKQQLYRAAVTLLGTEDPDGVTDEMLCIDPVTGKMLPPNQRHHGDTGLRNFIANNVVESRRFQYLIRYSDPAQLHQLASNKKLVRFVLSSIPDTQINRYYETCGQTRLAGRAAKVEFLTDMIAAIRFDQFRDVNQKERGANTQKERYKAMLGLYQTVLYLAVKNLVNINARYVMAFHCVERDMFLYDGELTDPKGESVSAFLAVNGKKGVQPQYLLLTQLFIRRDYLKRSACEQIQHNMENISDRLLREYRNAVAHLNVIAHLADYSADMREITSYYGLYHYLMQRHLFKRHAWQIRQPERPTEEEQKLIEQEQKQLAWEKALFDKTLQYHSYNKDLVKALNAPFGYNLARYKNLSIEPLFSKEAAPAAEIKATHA

SEQ ID NO: 180 - DNA, 36 bp, Artificial Sequence
  Direct repeat
actatagccctgccggaaatgacagggttctacaac

SEQ ID NO: 181 - protein, 963 aa, Artificial Sequence
  Metagenomic hit (no protein accession): contig emb|OCVV012889144.1|
MSKNKESYAKGMGLKSALVSGSKVYMTSFEGGNDAKLEKVVENSEIVSLAEKESFSAEIFKKNIGCKIENKKFKHPKRYDVIADNPLYKGSVRQDMLGLKETLEKRYFNSADGTDNVCIQVIHNILDIEKILAEYITNAVYSFDNIAGFGEDIIGMGGFKPIYTYKQFKEPDKYNKKFDDILNNSRLGYYGKAFFEKNDLKHNPNKKKRDKNPYILKYDNECYYIIALLSGLRHWNIHSHAKDDLVSYRWLYNLDSILNREYISTLNYLYDDIADELTESFSKNSSANVNYIAETLNIDPSEFAQQYFRFSIMKEQKNMGFNVSKLREIMLDRKELSDIRDNHRVFDSIRSKLYTMMDFVIYRYYIEEAAKTEAENRNLPENEKKISEKDFFVINLRGSFDENQKEKLYIEEAKRLWEKLKDIMLKIKEFRGEKVKEYKKEVPRIERILPQGKDISAFSKLMYMLSMFLDGKEINDLFTTLINKFDNIQCFLKIMPLIGVNVKFTEDYAFFNKSEKIADELRLIKSFARMGEPVANTKRVMMIDAVKILGTDLSDDELVNMADSFFNDSEGNLLKKGKHGMRNFIINNVIENKRFHYLIRYGDPAHLHEIAKNEAVVRFVLGRIADIQKKQGKDGKNQIDRYYEICVGKDRGKTVSQKLDELTKIIVNMNYDQFEQKKEIIENTRTKTKYMRYDEEQKLRKDNAEREKFKKIISLYLTVLYYVVKNIVNINSRYVIGFHCLERDAQLYSEKYNKEIDKKISSLTKFCLGESDEKKLKALAKKSLEELKTTNSKLYENYIKYSDERKAEEAKRQINRERAKTAMNAHLRNTKWNDIMYGQLKDLADSKSRICSEFRNKAAHLEVARYAHMYINDISEVKSYFRLYHYIMQRRIIDVIENNPKAKYEGKVKVYFEDVKKNKKYNKNLLKLMCVPFGYCIPRFKNLSIEQMFDMNETDNSDKKKEK

SEQ ID NO: 182 - DNA, 36 bp, Artificial Sequence
  Direct repeat
catatacaaccccgtaaagttacggggttctgaaac

SEQ ID NO: 183 - protein, 911 aa, Artificial Sequence
  Metagenomic hit (no protein accession): contig OCTW011587266.1
MKQNDRENNNKIKKSAAKAVGVKSLARLSDGSTVVSSFGKGAAAELESLITGGEIRKLSDKAILEITDDTQNKNAYNVKSSRIPNLTARTDKLSDKSGMDDLGFKRELELEVFGQCFDDSIHIQIAHAVFDIQKSLAAVIPNVLYTLNNLDRSYSTDNTSDKKDIIGNTLNYQHSYESFNVEKRGEFTEYYNAAKDRFSYFPDILCVLEKVNGKDRYQPKSEKDAFNVLSSVNMLRNSLFHFAPKSNDGKARIAVFKNQFDSDFSHITSTVNKIYSAKIAGVNENFLNNEGNNLYIILKATNWDIKKIVPQLYRFSVLKSDKNMGFNMRKLREFAVESKNIDLSRLNDKFLTNNRKKLYKVIDFIIYYHLNKVLKDSFVDDFVAALRASQSEEEKEKLYAQYSERLFADEGLKSAIKKAVDMISDTKSNIFKMKTPLDKALIENIKVNSDASDFCKLIYVFTRFLDGKEINILLNSLIKKFQDIHSFNTTVKKLSENNLIINADYVDDYSLFEQSGTVARELMLIKSISKMDFGLDNINLSFMYDDALRTLGVSDENLPEVKREYFGKTKNLSAYIRNNVLENRRFKYVIKYIHPSDVQKIACNKAIAGFVLNRMPDTQIKRYYDSLINKGATDIQAQAKALLDCITGISFDAIKDDKHLHKSKEKSPQRSADRERKKAMLTLYYTIVYIFVKQMLHINSLYTIGFFYLERDQRFIYSRAKKENKNPSKNSYLNDFRSVTAYFIPSEIMKRIEKNENKGFLEDFEALWNSCGKTSRLRKEDVLLYARYISPDHALKNYKMILNSYRNKIAHINVIMSAGKYTGGIKRMDSYFSVFQHLVQCDILSNPNNKGKCFESESLKPLLLDMKFDGTDEKLYSKRLTRALNIPFGYNVPRYKNLTFEKIYLKSSINE

SEQ ID NO: 184 - DNA, 36 bp, Artificial Sequence
  Direct repeat
cttatacaacacccattttcacagtgggtctataac

SEQ ID NO: 185 - protein, 904 aa, Artificial Sequence
  Metagenomic hit (no protein accession): contig emb|OGNF01009141.1
MADIDKKKSSAKAAGLKSTFVLENNKLLMTSFGNGNKAVIEKIIDEKVDSINEPEVFSVTPCDKKFELQPAKRGLAADSLVDNPLKSKKTAGDDAIHSRKFLERQFFDGNTFNDNIHIQLIYNILDIEKILSVHVNDIVYSVNNILSRGEGMEYNDYIGTLNLKSFETYKNNLVNKKKFDLDRVKKIPQLAYFGSAFYNTPEDTSAKITKTKIKSNEEIYYTFMLLSTARNFSAHYLDRNRAKSSDAEDFDGTSVIMYNLDNEELYKKLYNKKVHMALTGMKKVLDANFNKKVEHLNNSFIKNSAKDFVILCEVLGIKSRDEKTKFVKDYYDFVVRKNYKHLGFSVKELRELLFANHDSNKYIKEFDKISNKKFDSVRSRLNRLADYIIYDYYNKNNAKVSDLVKYLRAAADDEQKKKIYLNESINLVKSGILERIKKILPKLNGKIIGNMQPDSTITASMLHNTGKDWHPISENAHYFTKWIYTLTLFMDGKEINDLVTTLINKFDNIASFIEVLKSQSVCTHFSEERKMFIDSAEICSELSAMNSFARMEAPGASSKRAMFVEAARILGDNRSKEELEEYFDTLFDKSASKKEKGFRNFIRNNVVDSNRFKYLTRYTDTSSVKAFSNNKALVKFAIKDIPQEQILRYYNSCFGASERYYNDGMSDKLVEAIGKINLMQFNGVIQQADRNMLPEEKKKANAQKEKYKSIIRLYLTVCYLFFKNLVYVNSRYYSAFYNLEKDRSLFEINGELKPTGKFDEGHYTGLVKLFIDNGWINPRASAYLTVNLANSDETAIRTFRNTAEHLEALRNADKYLNDLKQFDSYFEIYHYITQRNIKEKCEMLKEQTVKYNNDLLKYHGYSKDFVKALCVPFGYNLPRFKNLSIDALFDKNDKREKLKKGFED

SEQ ID NO: 186 - DNA, 36 bp, Artificial Sequence; identical to SEQ ID NO: 159
  Direct repeat

SEQ ID NO: 187 - protein, 933 aa, Artificial Sequence
  Metagenomic hit (no protein accession): contig emb|OIEN01002196.1|
MERQKRKMKSKSKMAGVKSVFVIGDELLMTSFGDGDDAVLEKDIDENGVVNDCRNPAAYDAVYGTDSIRVKKTNNNIRAKVNNPLAKSNIRSEESALFRTRVNEYKREQKDKYETLFFGKTFDDNIHIQLISKILDIEKTFSVVIGNIVYAINNLSLEQSIDRPIDIFGDKNTQGISLREDNDYLKTMLPRCEYLFHNILNSDSDNNSKMNYNKVNKGKEEKDNRNNENIEKLKKALEVIKIIRVDSFHGVDGIKGDQKFPRSKYNLAVNYNEEIQKTISEPFNRKVEEVQQDFYRNSCVNIDFLKEIMYGSNYTDRGSDSLECSYFNFAILKQNKNMGFSITSIRECLLDLYELNFESMQNLRPRANSFCDFLIYDYYCKNESERANLVDCLRSAASEEEKKNIYFQTAERVKEKFRNAFNRISRFDASYIKNSREKNLSGGSSLPKYSFIEGFTKRSKKINDNDEKNADLFCNMLYYLAQFLDGKEINIFLTSIHNIFQNIDSFLKVMKEKGMECKFQKDFKMFSHAGHVAKKIEIVISLAKMKKTLDFYNAQALKDAVTILGVSKKHQYLDMNSYLDFYMFDNRSGATGKNAGKDHNLRNFLVSNVIRSRKFNYLSRYSNLAEVKKLAQNPSLVQFVLSRIEPSLICRYYESSQGISSEGITIDEQIKKLTGIIVDMNIDSFENINNGEIGMRYSKATPQSIERRNQMRVCVGLYLNVLYQIEKNLMNVNARYVLAFAFAERDALMLNFTLEECKKNKKRSSGGFSFIEMTQFFIDKKLFKVATEAIKKNVLKYNGNPESLNHIPGEYICKNMEGYHENTVRNFRNMVAHLTAVARVPLYISEVTQIDSYYALYHYCMQMNILQGIEQSGKILDNIKLKNALENARVHRTYSKDAVKYLCLPFAYNISRYKALTIKDLFDWTEYSCKKDE

SEQ ID NO: 188 - DNA, 36 bp, Artificial Sequence
  Direct repeat
gccccttgaccttacgaaatggtaaggttccaaaac

SEQ ID NO: 189 - protein, 1034 aa, Artificial Sequence
  Metagenomic hit (no protein accession): contig e-k87_11092736
MKRQKTFAKRIGIKSTVAYGQGKYAITTFGKGSKAEIAVRSADPPEETLPTESDATLSIHAKFAKAGRDGREFKCGDVDETRIHTSRSEYESLISNPAESPREDYLGLKGTLERKFFGDEYPKDNLRIQIIYSILDIQKILGLYVEDILHFVDGLQDEPEDLVGLGLGDEKMQKLLSKALPYMGFFGSTDVFKVTKKREERAAADEHNAKVFRALGAIRQKLAHFKWKESLAIFGANANMPIRFFQGATGGRQLWNDVIAPLWKKRIERVRKSFLSNSAKNLWVLYQVFKDDTDEKKKARARQYYHFSVLKEGKNLGFNLTKTREYFLDKFFPIFHSSAPDVKRKVDTFRSKFYAILDFIIYEASVSVANSGQMGKVAPWKGAIDNALVKLREAPDEEAKEKIYNVLAASIRNDSLFLRLKSACDKFGAEQNRPVFPNELRNNRDIRNVRSEWLEATQDVDAAAFVQLIAFLCNFLEGKEINELVTALIKKFEGIQALIDLLRNLEGVDSIRFENEFALFNDDKGNMAGRIARQLRLLASVGKMKPDMTDAKRVLYKSALEILGAPPDEVSDEWLAENILLDKSNNDYQKAKKTVNPFRNYIAKNVITSRSFYYLVRYAKPTAVRKLMSNPKIVRYVLKRLPEKQVASYYSAIWTQSESNSNEMVKLIEMIDRLTTEIAGFSFAVLKDKKDSIVSASRESRAVNLEVERLKKLTTLYMSIAYIAVKSLVKVNARYFIAYSALERDLYFFNEKYGEEFRLHFIPYELNGKTCQFEYLAILKYYLARDEETLKRKCEICEEIKVGCEKHKKNANPPYEYDQEWIDKKKALNSERKACERRLHFSTHWAQYATKRDENMAKHPQKWYDILASHYDELLALQATGWLATQARNDAEHLNPVNEFDVYIEDLRRYPEGTPKNKDYHIGSYFEIYHYIRQRAYLEEVLAKRKEYRDSGSFTDEQLDKLQKILDDIRARGSYDKNLLKLEYLPFAYNLPRYKNLTTEALFDDDSVSGKKRVAEWREREKTREAEREQRRQR

SEQ ID NO: 190 - DNA, 30 bp, Artificial Sequence
  Direct repeat 1
gtgagaagtctccttatggggagatgctac

SEQ ID NO: 191 - DNA, 30 bp, Artificial Sequence
  Direct repeat 2
gtagcatctccccataaggagacttctcac

SEQ ID NO: 192 - DNA, 36 bp, Artificial Sequence
  Direct repeat 3
gctagggcttgtaggaattccttgctatggtacaat

SEQ ID NO: 193 - DNA, 36 bp, Artificial Sequence
  Direct repeat 4
attgtaccatagcaaggaattcctacaagccctagc

SEQ ID NO: 194 - protein, 116 aa, Artificial Sequence
  Gut_metagenome_contig6893000291
MYPFINFAIFRYYNVYHKEADYLVDSLRASMNEVEKDAVYRREAVRIWPRLKKLILNHILPEMTGSKIKEKDAKPDPEMDASMIDSVKIGTESTLFTKIIFLTTLFLNGKETNDLI

SEQ ID NO: 195 - protein, 30 aa, Artificial Sequence
  exemplary Cas13d motif sequence
  SITE (2)..(10): Xaa is any amino acid
  SITE (12)..(16): Xaa is any amino acid
  SITE (18)..(29): Xaa is any amino acid
LXXXXXXXXXKXXXXXNXXXXXXXXXXXXD

SEQ ID NO: 196 - protein, 18 aa, Artificial Sequence
  exemplary Cas13d motif sequence
  SITE (1)..(11): Xaa is any amino acid
  SITE (13)..(13): Xaa is any amino acid
  SITE (15)..(18): Xaa is any amino acid
XXXXXXXXXXXFXYXXXX

SEQ ID NO: 197 - protein, 15 aa, Artificial Sequence
  exemplary Cas13d motif sequence
  SITE (2)..(4): Xaa is any amino acid
  SITE (6)..(15): Xaa is any amino acid
YXXXRXXXXXXXXXX

SEQ ID NO: 198 - protein, 940 aa, Artificial Sequence
  Ga0224415_10007274
MIEKKKSYAKGMGLKSTIVSGSKVYMTTFGDGSEARLEKVVENDSIKTLHEGEAFSAEMTDNNAGYKIGNVKFSHPNGYDVVANNPFYTGPVQQDMLGLKEILERRYFGSSTDGNNTICIQIIHNILDIEKILAEYITNAVYATNNIIDPDNDVIGGKKFTSIKTFAQFSASDSSNDFEQFLKNPRLGYLGKAFFYKDGKRNNRQKDPIECYHLLALLCGLRNWVVHNNEEKDLIKYTWLYNLDKYLDAEYITTLNYMYNDIGDELTDSFSKNSAANINYIAETLGIDPKTFAEQYFRFSIMKEQKNLGFNLTKLREVMLDRKDMSEIRENHNDFDSIRAKVYTMMDFVIYRYYIEEAAKVNAANKSLPDNEKSLSEKDIFVISLRGSFNEDQKDRLYYDEAQRLWSKVGKLMLKIKKFRGKDTRKYKNMGTPRIRRLIPEGRDISTFSKLMYALTMFLDGKEINDLLTTLINKFDNIQSFLKVMPLIGVNAKFAEEYSFFNNSEKIADELRLIKSFARMGEPVADARRAMYIDAIRILGTDLSDDELKALADSFSLDENGNKLGKGKHGMRNFIINNVITNKRFHYLIRYGNPVHLHEIAKNEAVVKFVLGRIADIQKKQGQNGKNQIDRYYETCIGKDSSKSVAEKVNALTKIITGMNYDQFDSRRNVIENTGAGNAEREKYKKIISLYLTVIYHILKNIVNINSRYVIGFHCVERDAQLYKEKGYDINLKKLKDKGFTSVTKLCAGIDEECKDVEKEMTERAKASFAALETANPKLYATYINYSDEEKNAELRKQINREKAKTALNAHLRNTKWNVIIREDLLRRDNKACKIFRNKVAHLEAIRYAHLYINDIAEVNSYFQFYHYIMQRRIMAERYDKSSGKVREYFDAVNNEKKYNDRLLKLLCVPFGYCIPRFKNLSIEALFDMNEAVKFDKEKK

SEQ ID NO: 199 - DNA, 36 bp, Artificial Sequence
  DR
caagtaaacccctaccaagtggtcggggtttgaaac

SEQ ID NO: 200 - protein, 1057 aa, Artificial Sequence
  EMG_10003641
MEETKVTKETTIEKQSTKRHKQKSKKTATKMSGLKSALVINNHEMLLTSFGKGNNAIAEKRYILDGDIETINNKNKKFDANNDSKVVVIKGISNPNGQLTNPLFDQSPTAIQPNRTSGNDMIGIRRMLERKYFVHNEENKEFQDNIRIQIAYCILDIEKILMPHINNICFEINNMLRLEGYQEDSFMGSFNLYKPYDAFIATTDDKESSRRDNFAKLMTSKQVRYLGNALYSDSLSNLTKDEILDGKRSKELKKYYQELCLLGMVRQSMIHSNQFNSSIYTLDSSYDSTMNTAELLGKGDDSSLVALATDARVEARAILDEIYKKGVDSINNSFLSNSINDLENLFKIYKCDSSEKKTELIKQYYDFCIRKPQMNMGFSITTIREGMFTRCSEANTLLLCDEGSTVKLNVHDTMKSKFYKNLDFMIYKYYKYENPEKGEKLIEDLRSKIKGKKKEDEDKKQRYAEESACILKAKRDIIKKDLTEAANKDLFADLVKSNKNEKQKFKNEYEELLKPFMIPVKVDYFSELIYLVTRFLSGKEINDLLTQLINKFENIAAFIRMYQNDQGKLEFTANYKMFEIDPQKDIPKDGKRVLSGSAKIAYYLRTINYIARMESFEIKSDKTAINDAISLLGYNSNEHRDEFITYTMAKHVVDKYQNTDYQKIVKDFLSANKTLDCKSKNMQAFVSELKNAHLSENYEQREKEIYELADTNLPAYFSEEDKEKLARYIVHSDGTYKKFLKESFYAIEELPNEGFRNFISNNVINSRRFNYIMRFCNPEKIANIGKNKVLISFALSSLAEKTDMIAKYYRVFCDRIDDQKTMEDYLVNKLTKISYTEFLNVNQKANAEKNKEKDRSQKLIGLYITLLYEIVKNLVNINSRYNIAFQRCDNDSIMILQGQYDERAVQESKLTKKFISNQKLNSYSCRYLTHNISQLDRCNDFIRQYRNKVAHLEVVSNIDEYLSGIKHIESYYALYHYLMQKCLLKNYRIEDHSQNEYKNLNDFSSKLDKHGTYVKDFVKALNVPFGYNLPRYKNLSIDELFDRNKLKTGGTIEMKGE

SEQ ID NO: 201 - DNA, 36 bp, Artificial Sequence
  DR
gaactacacccctgcagaaatgctggggtctgaaac

SEQ ID NO: 202 - protein, 973 aa, Artificial Sequence
  Ga0129306_1000735
MQKQREQQTVTDESERKKKPLKSGAKAAGLKSVFVLSEGKELLTSFGRGNEAVPEKRVTGGTIANARTDNKEAFSAALQNKRFEVFGRTAGSSDDPLAVSRAPGQDLIGAKTALEERYFGRAFADNIHMQVIYAIQDINKILAVHANNIVYTLNNLDREADPETDDFIGSGYLTLKNTFETYCDPAALNEREREKVTVSKQHFDAFMQNPRLAYYGNAFFRKLSKAERLARGREIFDKESPERRQEILGSRGKNKSVDDEIRALAPEWVKREERDVYSELVLMSELRQSCFHGQQKNSARIFRLDNDLGPGVDGARELLDRLYAEKINDLRSFDKTSASSNFRLLFNAYHADNEKKKELAQEFYRFSVLKVSKNTGFSIRTLREKIIEDHAAQYRDKIYDSMRKKLFSTFDFFLWRFYEEREDEAEELRACLRAARSDEEKEQIYAEAAASCWPSVKPFVESVAATLCDVVKGRTKLNKLKLSADESTLVRNAIDGVRISPRASYFTKLIYLMTLFLDGKEINDLLTTLIHAFENIDSFLSVLGSERLERTFDANYRIFADSGVIAQELRAVNSFARMTTEPFNSKLVMFEDAAQLFGMSGGLVEHAEELREYLDNKMLDKTKLRLLPDGKVDTGFRNFIISNVTESRRFRYLVRYCEPRAVRDYMSCRPLIRLTLRDMPDTILRRYYEQSVGAATVDRERILDTLADKLLSLRFTDFENVNQRANAERNREKQKMMGIISLYLNVAYQIVKNLVYVNARYTMAYHCAERDTELLLNAAGEGNLLRRDRSWPARLHLPRRALARRRDRVEVMERDVARGPEAYNRDEWLGLVRTLRREKRVCDNLHNNYAYLCGADAEPGDASLSLLFVYRNKAAHLSVLNKGGRLSGDLKEAKSWFYVYHFLMQRVLEEEFRNTQALPERLRELLMMAERYRGCSKDLIKVLNLTFAYNLPRYKNLSIDGRFDKNHPDPSDE

SEQ ID NO: 203 - DNA, 36 bp, Artificial Sequence
  DR
ccactacacccctgtcgaacaacgggggtctaaaac

SEQ ID NO: 204 - protein, 854 aa, Artificial Sequence
  Ga0129317_1008067
MKKQKKSLVKAAGLKSAFVVGDSVYLTSFGKGNAARLDTKINPDNSTERYVSDSEKHTLKINSITDTELRLSGPFPKQAEAKNPTHKKDNEQKNTRQDMLGLKSTLEKFYFGSTFDDNIHIQIIHNIQDIAKILAAHSNNAGYALDNMLAYQGVEFSDMIGYMGTSRTFDNYDPNHKNNKDFFRFLKLPRLGYFGSAFYSQKGKDFEKRSDEEVYNICALMGQIRQCCFHGKQEKYQLKWLYNFHNFKSNKPFLDTLDKHFDEMIDRINKNFIKNNTPDLIILSGLYPDMAKKELVRLFYDFTTVKEYKNMGFSVKKLREKMLESEEASDFRDKDYDSVRRKLYKLMDFCIYYLYYSDSERNENLVSRLRESLTDENKDIIYSKEAKIVWNELRKKFSTILDNVKGSNIKKLENVKEKFISEDEFDDIKLDIDISYFSKLMYVMCYFLDGKEINDLLTTLVSKFDNIGSIIEAATQIGINIEFIDDFKFFDRSKDISVELNIIRNFARMQAPVPNAKRAMQEDAIRILGGSEEDIFSILDDMTGYDKSGKKLAQSKKGFRNFIINNVVESSRFKYIVRYSNPQKIRKLANNSVVVGFVLGKLPDAQIESYFNSCLPNRVYSTPDKARESLRDMLHNISFNDFADVKQDDRRATPEEKVEKERYKAIIGLYLTVMYHLVKNLVYVNSRYVMAFHCLERDAMHYDVSLDNYRDLIRHLISEGDSSCNHFISHNRRMRDCIEENVKNSEQLIFGKEDAVIRFRNNVAHLSAIRNANEYIGDIREITSYFALYHYLMQRKLIDDCKVNDTAHKYFEQLTKYKTYVMDMVKALCSPFGYNLPRFKNLSIEGKFDMHESK

SEQ ID NO: 205 - DNA, 36 bp, Artificial Sequence
  DR
gaactacactactgtaattttgcagtagtctaaaac

SEQ ID NO: 206 - protein, 965 aa, Artificial Sequence
  Ga0224415_10048792
MSKKENRKSYVKGLGLKSTLVSDSKVYLTTFADGSNAKLEKCVENNKIICISNDKEAFAASIANKNVGYKIKNDEKFRHPKGYDIISNNPLLHNNSVQQDMLGLKNVLEKRYFGKSSGGDNNLCIQIIHNIIDIEKILSEYIPNVVYAFNNIAGFKDEHNNIIDIIGTQTYNSSYTYADFSKDKSDKKYIEFQKLLKNKRLGYWGKAFFTGQGNNAKVRQENQCFHIIALLISLRNWATHSNELDKHTKRTWLYKLDDTNILNAEYVKTLNYLYDTIADELTKSFSKNGAVNVNYLAKKYNIKDDLPGFSEQYFRFSIMKEQKNLGFNISKLRENMLDFKDMSVIRDDHNRYDKDRSKIYTMMDFVIYRYYIDNNNDSIDFINKLRSSIDEKSKEKLYNEEANRLWNKLKEYMLYIKEFNGKLASRTPDRDGNISEFVESLPKIHRLLPRGQKISNFSKLMYLLTMFLDGKEINDLLTTLINKFENIQGFLDIMPEINVNAKFEPEYVFFNKSHEIAGELKLIKGFAQMGEPAATLKLEMTADAIKILGTEKEDAELIKLAESLFKDENGKLLGNKQHGMRNFIGNNVIKSKRFHYLIRYGDPAHLHKIATNKNVVRFVLGRIADMQKKQGQKGKNQIDRYYEVCVGNKDIKKTIEEKIDALTDIIVNMNYDQFEKKKAVIENQNRGKTFEEKNKYKRDNAEREKFKKIISLYLTVIYHILKNIVNVNSRYILGFHCLERDKQLYIEKYNKDKLDGFVALTKFCLGDEERFEDLKAKAQASIQALETANPKLYAKYMNYSDEEKKEEFKKQLNRERVKNARNAYLKNIKNYIMIRLQLRDQTDSSGYLCGEFRDKVAHLEVARHAHEYIGNIKEVNSYFQLYHYIMQCRLYDVLKNNTKAEAMVKGKAKEYFEALEKEGTYNDKLLKIACVPFGYCIPRYKNLSMEELFDMNEEKKFKKKAPENT

SEQ ID NO: 207 - DNA, 36 bp, Artificial Sequence
  DR
caagtaaacccctaccaaatgtaaggggtttgaaac

SEQ ID NO: 208 - protein, 1022 aa, Artificial Sequence
  160582958 _gene49834
MKNSVTFKLIQAQENKEAARKKAKDIAEQARIAKRNGVVKKEENRINRIQIEIQTQKKSNTQNAYHLKSLAKAAGVKSVFAIGNDLLMTGFGPGNDATIEKRVFQNRAIETLSSPEQYSAEFQNKQFKIKGNIKVLNHSTQKMEEIQTELQDNYNRPHFDLLGCKNVLEQKYFGRTFSDNIHVQIAYNIMDIEKLLTPYINNIIYTLNELMRDNSKDDFFGCDSHFSVAYLYDELKAGYSDRLKTKPNLSKNIDRIWNNFCNYMNSDSGNTEARLAYFGELFYKPKETGDAKSDYKTHLSNNQKEEWELKSDKEVYNIFAILCDLRHFCTHGESITPSGKPFPYNLEKNLFPEAKQVLNSLFEEKAESLGAEAFGKTAGKTDVSILLKVFEKEQASQKEQQALLKEYYDFKVQKTYKNMGFSIKKLREAIMEIPDAAKFKDDLYSSLRHKLYGLFDFILVKHFLDTSDSENLQNNDIFRQLRACRCEEEKDQVYRSIAVKVWEKVKKKELNMFKQVVVIPSLSKDELKQMEMTKNTELLSSIETISTQASLFSEMIFMMTYLLDGKEINLLCTSLIEKFENIASFNEVLKSPQIGYETKYTEGYAFFKNADKTAKELRQVNNMARMTKPLGGVNTKCVMYNEAAKILGAKPMSKAELESVFNLDNHDYTYSPSGKKIPNKNFRNFIINNVITSRRFLYLIRYGNPEKIRKIAINPSIISFVLKQIPDEQIKRYYPPCIGKRTDDVTLMRDELGKMLQSVNFEQFSRVNNKQNAKQNPNGEKARLQACVRLYLTVPYLFIKNMVNINARYVLAFHCLERDHALCFNSRKLNDDSYNEMANKFQMVRKAKKEQYEKEYKCKKQETGTAHTKKIEKLNQQIAYIDKDIKNMHSYTCRNYRNLVAHLNVVSKLQNYVSELPNDYQITSYFSFYHYCMQLGLMEKVSSKNIPLVESLKNEANDAQSYSAKKTLEYFDLIEKNRTYCKDFLKALNAPFSYNLPRFKNLSIEALFDKNIVYEQADLKKE

SEQ ID NO: 209 - DNA, 36 bp, Artificial Sequence
  DR
gaactacacccctctgttcttgtaggggtctaacac

SEQ ID NO: 210 - protein, 998 aa, Artificial Sequence
  250twins_35838_GL0110300
MGNKQRVSAQKRRENAKLCNQQKARQAESQRDKIKNMNVEKMKNINTNDIKHTKTTAKKLGLKSTIIADKKIILTSFINEQSSKTANIEKVAGFKGDTIDTISYTPRMFRSEINPGEIVISKGDDLSEFANPANFPIGRDYVKIRSALEKQYFGKEFPEDNLHVQIAYNVADIKKILSVYINNIIYMFYNLARSEEYDIFYNSQSENSGRDCDVIGSLYYQASYRNQDANRFEKDGKKKAIDSLLDDTRAYYTYFDGLFSVPKREDDGKIKESEKEKAKDQNFDVLRLLSVGRQLTFHSDKSNNEAYLFDLSKLTRAAQDENRRQDIQSLLNILNSTCRSNLEGVNGDFVKHAKNNLYVLNQLYPSLKANDLIGEYYNFIVKKENRNIGIRLITVRELIIEHNYTNLKDSKYDTYRNKIYTVLNFILFREIQENSIAIKNFREKLRSTEKAEQPALYQAFANKIYPMVQAKFAKAIDLFEEQYKTKFKSEFKGGISIENMQQQNILLQTENIDYFSKYVLFLTKFLDGKEINELLCALINKFDNIADLLDISKQIGTPVVFCADYESLNDAAKIAENIRLIKNIAHLRPAIQEAQSSKDNADAAGTPATLLIDAYNMLNTDIQLVYGEAAYEELRKDLFERKNGTKYNKKGKKVDVYDHKFRNFLINNVIKSKWFFYIAKYVKPADCAKMMSNKKMIEFALRDLPETQIKRYYYTITGNEALGDAESLKGVIIEQLHAFSIKNTLLSIKNMGEGEYKIQQIGSSKEKLKAIVNLYLTVAYLLTKSLVKVNIRFSIAFGCLERDLVLQKKSEKKFDAIINEILLEDDKIRKECDKERAQAKTLPRELAQERFAQIKRRESGCYFKSYHVYDYLSKNSNEFKQNHIDFAVTSYRNNVEHLNVVHCMTKYFSEVKDVKSYYGVYCYIMQRMLCDELIIKNQDKPDVRQTFEEYNRLLKDHGTYSKNLMWLLNFPFAYNLARYKNLSNEDLFNAKNNDQKSK

SEQ ID NO: 211 - DNA, 36 bp, Artificial Sequence
  DR
gtacaatagcccgttgaaatagatgggttctaagac

SEQ ID NO: 212 - protein, 1020 aa, Artificial Sequence
  250twins_36050_GL0158985
MKKKHQSAAEKRQVKKLKNQEKAQKYASEPSPLQSDTAGVECSQKKTVVSHIASSKTLAKAMGLKSTLVMGDKLVITSFAASKAVGGAGYKSANIEKITDLQGRVIEEHERMFSADVGEKNIELSKNDCHTNVNNPVVTNIGKDYIGLKSRLEQEFFGKTFENDNLHVQLAYNILDIKKILGTYVNNIIYIFYNLNRAGTGRDERMYDDLIGTLYAYKPMEAQQTYLLKGDKDMRRFEEVKQLLQNTSAYYVYYGTLFEKVKAKSKKEQRAKEAEIDACTAHNYDVLRLLSLMRQLCMHSVAGTAFKLAESALFNIEDVLSADLKEILDEAFSGAVNKLNDGFVQHSGNNLYVLQQLYPNETIERIAEKYYRLTVRKEDLNMGVNIKKLRELIVGQYFPEVLDKEYDLSKNGDSVVTYRSKIYTVMNYILLYYLEDHDSSRESMVEALRQNREGDEGKEEIYRQFAKKVWNGVSGLFGVCLNLFKTEKRNKFRSKVALPDVSGAAYMLSSENIDYFVKMLFFVCKFLDGKEINELLCALINKFDNIADILDAAAQCGSSVWFVDSYRFFERSRRISAQIRIVKNIASKDFKKSKKDSDESYPEQLYLDALALLGDVISKYKQNRDGSVVIDDQGNAVLTEQYKRFRYEFFEEIKRDESGGIKYKKSGKPEYNHQRRNFILNNVLKSKWFFYVVKYNRPSSCRELMKNKEILRFVLRDIPDSQVRRYFKAVQGEEAYASAEAMRTRLVDALSQFSVTACLDEVGGMTDKEFASQRAVDSKEKLRAIIRLYLTVAYLITKSMVKVNTRFSIAFSVLERDYYLLIDGKKKSSDYTGEDMLALTRKFVGEDAGLYREWKEKNAEAKDKYFDKAERKKVLRQNDKMIRKMHFTPHSLNYVQKNLESVQSNGLAAVIKEYRNAVAHLNIINRLDEYIGSARADSYYSLYCYCLQMYLSKNFSVGYLINVQKQLEEHHTYMKDLMWLLNIPFAYNLARYKNLSNEKLFYDEEAAAEKADKAENERGE

SEQ ID NO: 213 - DNA, 36 bp, Artificial Sequence
  DR
gtacaatagccctgcagtaaggcagggttctaagac

SEQ ID NO: 214 - protein, 903 aa, Artificial Sequence
  31009_GL0034153
MGSRGVIIMTEKRKSRAKALGVKSAFLKDDDVIMTSFGRGNDAVVEKIIKNNEVQNINIDKPVYDVVGVEKETGIINVVGTKRGINTINKKKQYANTQVSQKRMGMDLIQRKDKLEKVFFNENFNDNIHIQLIYNILDIEKILSVYVNNIVYALGNLERDNSDDEKDLIGYASTLNSYEDFINKNLVKQNENIDKFIENGNRLGYFGNVFYKNKNELKDKKDIFDMLCLLGSLRQFCFHFKGAKFEGVEQISNSWLYNLSQLHNEFKSTLDSFYNEKIEDINGNFIEKNKVNIQILCNDLKLDKNKLVQDYYNFLISKNHKNMGFSIKKIREYILDIDYASYIKEQGYDSVRSKLFTLIDFIIYDLYVNKEKDRIDDIVSKLRGAIYDYKKDDIYKAEADWVWKKLNRQIKALTKLLSNRRIFSQDNDITNWNGVEFEKIGEQKLEDNADYFCKLMYFVTLFLDGKEINDLLTTLINKFDNIRSFIEVMEEMSLKCEFMEEYKFFNESKDICLRLKEIHSFARMKRPLDNKNVEKEMYKDAISILMKDSSIENSNIDVIFNTYIYQKDNKNAKKDFRNFIIKNVIKSNRFIYLIKYSNPTNVRKFASNTNVIKFVLGTLPDKQLERYYKSCGLSDGIGKTEWVRELSEIITGIDYSDFLNVKQRAKSKEEKEDKAKKQAIVTLYLTILYILTKNLVNVNSRYVIAVHCIERDSELYKTELYEKLKPEQPEKLYKIKPDKPLQPAQYFLFTKYLLQNDFFGEYTSKKNQYIQKNMKIYSKINKNFNVFVRYRNNIAHLNSIKNATKYVNDIGTFTSYFQLYHYIMQCDLKDWVKKEVEEKKISDKYYNYLEKYYKNNNIYLKDFVKAINVPFAYNYSRFKNLSIDKLFDKNDPRKKKWIVIFNF

SEQ ID NO: 215 - DNA, 36 bp, Artificial Sequence
  DR
gaactacacccttgttaaataacatgggtctaaaac

SEQ ID NO: 216 - protein, 951 aa, Artificial Sequence
  530373_GL0023589
MKTEMKNGEVKTSAKKENCSIAKANGLKSTFKLAENTYYMTSFGKNNTADPEKNIVRMNVENIRNTFSATPISERIVDITGETKKTAQVVLPACSDNQLHAKDTIEQMYFGKTYTDNIHIQIAYNIMDMKKIFGVYSNNIIYSINNLLEEREGSDFLGVFYTENSYQAMNFADAIIKSKLLTKNSKYLNLDMNNVWFNKEVSELSSFRKYVYSRSYANKTSTAKKICICLQEDFHFFDYATVKKAADQFTLLKRIQRSNYFFDMLCDSAGNYQCKNAQILLSILGNLRQESFHENRSTSAWMFNLEKVLTPERKKLLTALIDSRTNHINNHFIENSNKNLNAIFRLFPEKSQADLIVEYYDFSVRKAYKNLGFSVKLLREMLLKTQQELSPLNDKAYDSIRSKLYTMFDFVLYKLYVDNEEQIDQFVRKLRASTSNVEKEALYQQESERTWNEIRGQIIDNVIPFIDSIQKQENEDKLTKRIDQSIIDKAVPHFVNSRDLSYFAKVVYVVASFLDSKEINMFFDALINELENIASFNDVLEQLDMPLDYQEKYRFFERSREEAAGLRFIKSIAKMNKTRVAVKNDTKTVKLKQYCDAGAVLGEINAEKIKAAFGLGDKFNTEEARVDHTFRNFIINNVINSNRFNYVMRFMNPKSARRIMQCESLVAFSLKDIPDTQIERYCKSVNIPFDSANPNYAHMKEQLTYKLLQVQFCNFSKVSNSSHQAVEKERLKALVGLYLSVLYRIVKSIVRINTSYTIAFAAYERDCVILNRKMGKNLYGLKTDPMGITNDFMHMPTVAPSNPHNDFINETKLSKRVCALVNKNRTLCTNRTYQVYRNIIMHLNAVSAFPQYLEGLKVVHSYFDLYHYTVMMLLHRQNEKEKKRNEKEKKQNEKENNMILSTAALEKYDMVRKYQSANKDFIYAINSPLAYNAARYINLSCRTKFEEGFGK

SEQ ID NO: 217 - DNA, 36 bp, Artificial Sequence
  DR
acttaaatccccctgtaaatgcgggggttctaaaac

SEQ ID NO: 218 - protein, 928 aa, Artificial Sequence
  BMZ-11B_GL0037771
MSKDKKTKAKRMGVKALLAHGEDKLTMTTFGKGNRSKIEFTEGYHGRALETPKHFGKRGFEVRKIDENVDLYGDLEEGKTIEALLINPSEKVGEDYLKLKGTLEKRFFGREFPHDNIRIQLIYNILDIYKILGMNVADILYALGNMQDTELDIDMFGQSLNNPEKAKDVVQRMKPYMGFFGGIFRTQKKEDRKKDSNLSEEEKEEKKKKQEELLQKDLQHNMDVARCISALRHATAHNKPATAHDKQDEYPWFKSSDIYETKIFKAGMWSVIEADYKKKIQDVNKQFFSKNKVNLAILFDLLDVRDVKQKKRISDEFYRFTIRKDGKNLGMNLVKIREIIIDRYASGLRDKKHDPHRQKINVIADFLIFRALSQNQGIIDKTVSSLRLTKDEEEKDHVYQNAAELVWGMVSNCLTPYFNDPKNKYILKYKDAKTPGDFEDWITSKISEDDGEPFVKVLSFLCNFLEGKEINELLTAYIHKFECIQDFLNVISSLGENVQFQPRFALFNNASFAQNVAVQLRILASIGKMKPDLTEAKRPLYKAAIRMLCPPEKWEKYTSDEWLEKNMLLNSEDRKNDKKKKQVNPFRNFIAGNVIESRRFMYLVRYSKPKAVRAIMQNRSIVNYVLHRLPSEQIKTYSRVFPEDFSDTEAEIDFLVNKLSEFSFETFISNQQTILNNSKRGFSPNRRETAEEIERLKAITGLYLSVAYIAIKNIVKANARYYIAFAVFERDKELVKAKDARIQTTIPNTKFTNYFCLTQYYLDRDEEKKFPGDPRDKEAFFEHLRKTKRHFSKQWREWLNEKIADAKSSQATGLLLREARNDVEHLNVLRAIPDYIQDFRHGEKGETAMNSYFELYHYLMQRLMLKNTELDLSHWSGWIMRSGRPDRDLIQIAFVSLAYNLPRYRNLTKEHHFDDTVLQKIREKESLD

SEQ ID NO: 219 - DNA, 36 bp, Artificial Sequence
  DR
ggtcaacagtgtggggaattacccgcactctacaac

SEQ ID NO: 220 - protein, 940 aa, Artificial Sequence
  BMZ-11B_GL0037915
MAEHSKKTAAKRVGIKSVIAHDGGKLAVTTFGKKSAAKLAYRDGDQTPFDEEKKSELGGFNVTGVDENTVDAERGIPGEGLIEASVANPVNDLIDESRKEYGQDYLMLKDQLEKVFFGQTFPGDNLRIQIIYNILDMQKAFGLYVNDVLYAVNNLQNTGRLLTDDDWTSDVIGLALGKGRGKEIIESMSDALGFFGSAFKPIPKKPGDKTSGKYAGGKLKERDAAIAEDVAVLRVLCGLRQISAHFRSEKKGESLWASDLGVEKYFKNEMSVVDANYKARAKKIDANFMATSRANLVLLFRILNAKTKEEKEKIAVDYYKFAIRKEGKNLGVNLKKAREILLDKHYPDAKNKQFDSYRGKLYTITDFIIYRMAAEDGAFLEESVQKLRSTPSEEEKEKVYDVLAETIWNATKDDVKKVFDIRQQDIKNAAAQSLDDVNLDSVTVEKEKEFPVVKLLAFLCNFLDGKEINELLSTFVNRLENVQALIDLAKNLGETVNFSKNYAVFNDCGSGAAGRIAERLRLLASIGKMDAGLDSLKPLFIRFAIQILGGARISDEDVDAYIKENILVRKDDPEKKRSNTFRNFITNNVIKSRRFVYLVRYTKADAVRAVMKNGKIVRYVLARIPETQVDSYYKSVVDSSDAGNGKPIKEKIKALAEKLGEFSFDLIAENRDGIIDNAKLDEEKKNVEIERLKAVTGLYLTVAFIAIKNLVKANARYYIAYSAFERDSELLKEKLGEEEFYKLCIEFKNKKGETGYNNAFALLKYYIDRDEDIWRKEEATHRGRDENGKLDYDPDPRRKHYPKRRWLNILKDNLAEMERIDPTGMLAAQMRNDAMHLNAMFKIAKFVGDFRKGSSHEMRSYFELFHFLEQKTLLDSKEDFVQGMRESYGDRIRVEPCVDLIKYLYITLGYSLPRYKTMTVSGLFDPDSEDAKERAKGKRA

SEQ ID NO: 221 - DNA, 36 bp, Artificial Sequence; identical to SEQ ID NO: 219
  DR

SEQ ID NO: 222 - protein, 923 aa, Artificial Sequence
  BMZ-11B_GL0069617
MPHNKKSTIKRIGVKSAFSHGNSRLTITQFGRGNTADIAVETDSRGRSLSLPHRVEKSFTVNKIDDEIDVQRSSLLGTLLNPAENDPVDYLGLKSTLEKEFFGQEFPNDSIRIQIIHNILDIQKILGIYINDVLYSIANLQNVETVEDCLGQSLSKGQDEKLKKILNSITPYLGFLGAGFKQSERPKHQKNSRPDPRQKIEDPNWAYNKSALRILSTLRNKLAHFEDSSILFCDNLKGQFLGSNGNWITIETHYDEMITRINESFFNNSRMNLKILYLVLNAATLEDKKKITEEYYRFSILKEGKNLGVNMRKLREMMVDMFYSEIKDKQYDSYRQKIYTILDFLLFREIKDSEELETMVADLRESESDEKKEELYHDYAELFWDGVKDLIVPFFAAFDGDFTVFTTEKVPADTSKEPFLSSANTEPLVKLLAFLCNFWDGKEVNEVLSAYIHKFESIQAFIDVLESKELNEKVVFSAKKGRNFSAFNEHGFAGRVADQLRVLASIGKMKPDLEGAKRALFRDAVETLGIVENSNWLNEDGTISNDWLETYVLPGDKVTEEEKRAIKPFRNFIANNVIESRRFMYLARYAKPKSVRELMKHEEIIRYVLTRLPEKQIDTYFSNISEGDESEISRKIDTLTKALTGFSFNSLFINRDKIVENTKLDTSNKNVKIERLKALTGLYLTVAFVAVKNLVKANARYFIAFSAFERDYGFMKSHDPDVAQSCLAYEEIMDGKSKTKYNEIYALTEYYLKKEEENDYHPEPGQPFDKEACRKHLDSIRRHFTKKWRDIFRKEIDEAVKIHFTGYLGVWARNQSAHLNVLTQALPQFIGQFARNSKTGKTARMTSYFQLYHYLLQRLLCEDLNFDVPEEWKNKIQETGLPCNDLIHICFVPLGYNLPRYKNLTIECLFDEDSVSAKEGKKA

SEQ ID NO: 223 - DNA, 36 bp, Artificial Sequence
  DR
atacagcagccctacagattcgtagggttctgtgac

SEQ ID NO: 224 - protein, 993 aa, Artificial Sequence
  DLF014_GL0011914
MAKKKNAKQRREEEKNRLKAKIEKFKIKYAEQETVDKITEEIAQSDKIMRTESILVQHTKKSLAKASGVKSVFIKDDEVIMTSFGRGNDAVVEKIIKDNNVDEKNTKPAYEIVDIEKNGDLIKVQSRRCKNIESANTELPPEKIGMDLIRCKDKLEEIYFGRTFNDNIHIQLIYNILDIEKILSVYINNAVYALGNLERKENDKEKDLVGYLSARAGYNKVINKAINDEKIKDRIEDLKEFIENGNRLGYFGDIFFKKEEVSKNGKKPKKVEVLKSEKEIFDILALLGSLRQFCFHYDEAVFENEDGVIDKEYNDNSWLYNLEKLEPEFKDTLDYFYNRKINDINKGFIKTNQINLHIICDELGLNWDKEQVVGDYYDFLIAKKYKNIGFSIKKIREHMFDIYEAFDIKDKRFDSVRSIMYKIIDFVIYYSFIHYKQDEVDEIVNYLRSTLSEEQKKEKYIKLAGNIWAEYKTQFNKLKDILLANIKEFSDAKEDDVYYEEFKNFKFNEVGKEKLGENAEYFCKLMYLLTLFLDGKEINDLLTTLINKFDNIRSFVELMKEENIECIFDKKFAFFDESKNVCSTLREINSFARMQKPLNNVSVKREMYKDAIKILLKDTRAEEQNIDRILNEYIPSKEDKGIKKDFRNFIIKNIIKSNRFMYLVKYSNPTDVRNLASNRNVVKFVLNAIPDTQIDRYYKSCIQHYSNEVDKETQIQELTDIITGIDYLDFLDVRQSYRNEDKSKKQAVVTLYLTILYILTKNLVNVNSRYVIALHCLERDSKLYGYTKLSKKNNKKLEKIKPPKYHELTKYFIDNRYFDRKKKNKKYGEYTSKKISTYIETNMKNFIGCEQFRTPERYRDTQIDMFVKYRNSIAHLNAVRKASKYINDIRGFDTYFELYHYIMQRDLKDILEKIAEGAAKETEEGQKQDELLKTYFDNLDKYGTYVKDFVKALNIPFAYNYPRYKNLSIDELFDKNNTRKTIKIQDKKLEERT

SEQ ID NO: 225 - DNA, 36 bp, Artificial Sequence
  DR
gaactactacctcacagatttgtggggttcagaaac

SEQ ID NO: 226 - protein, 924 aa, Artificial Sequence
  EYZ-362B_GL0088915
MKKKLNIREQREAKKAAAKQIYAAKASAAQKKADETVVAAQPAGDTANSKPIKSRNKAAGLKSTFVVGDSLYMTSFGKGNLSVPEYRVDTGDAYRVDPISEHSELHVLGADDLAVSFSGTRRMKDVSELKADNPLHSGKNNLVPKNGTDILGLKGILEQRYYGRNFDDNVHIQIIYNILDIEKNLAIYVTNVVAALDHMCDETLDTEHEDFIGYMNTMNSFDVFMHPSQSSRADIYKKINDSRRRFENLLRTKRLGYFGFAYNPKDRNQKKRLYYLMSMIGQLRQFAFHKDSPFNRVWLYQLDEKLSKEHKDTLNYFFDQRYDEIHENFNKTNKVNLELLAEAFPSEDYATLANQYYDFTVFKAHKNLGFSIKKLREKLIENALRDEKIDSFRSKLYRLIDFCLFRIYLKDPDRAEKNVRFLRSCINEQEKEQFYTQEANALKSENPGLVNDFCMQLKDRYSSGSNSTENAEKKEDFPVFPHCHDKQKVSNVSLFAKLMYAFCLFLDGKEINELLSALLNKFDTIACMTKCTKDLGIYAPFSKDFNFFEDSEQRAEEMNLVKSIARMTKPDIQAKEQLFRDALDILGVEVGVSEEALQKEIHQYFQKGAKHDFRNFIINNVINSTRFIYVIKFCNPKTAGQIIRNENILRFVLQRMPQEQIERYYHACTKNPSLCTHDEKIQCLSNIIMEVRYKKFCNVAQKSRDTTKQMEKERFKAIIRLYLTAIYLVVKNLVNVNARYVLAFHCLERDADLFGLQIKQTLPDRKKKSDYLKLAVDQCGDNPENKPKGYLARNKRLCQCVREDIDNAKHLNGDITDYRNCVAHLNVVRNCDQYLENIDTVHSYFSLYQYLVQHYLLKRFEKDKYRCKDDLAIHYYSQVKQYRSYVKDLVKALNAPFGYNIPRFKNLTVEQLFDRNADPETITA

SEQ ID NO: 227 - DNA, 36 bp, Artificial Sequence
  DR1
gaactatagtagtgtgaatttacactactctaaaac

SEQ ID NO: 228 - DNA, 36 bp, Artificial Sequence; identical to SEQ ID NO: 130
  DR2

SEQ ID NO: 229 - protein, 1054 aa, Artificial Sequence
  Ga0099364_10024192
MSQSTKTKAKRMGVKSVLAHGKDEKGHIKLAITAFGKGNKAELAIQTDEKGSNLAKTYKERNITANKIVSEGIQTSGTIAGEGHATFLNNPAEHVGTDYLKLKETLEMEFFGKSFPGDSVRIQIIHQILDIQKLLGIYITDIIYCINNLRDETHLDHESDIVGLSMSNTNVNLALNQMRPYFGFFGEAFRPVGDDKVKEITLSDEVRKNIEKIIALEEQKRNPSTPRFKQENINLEIENAMGKFKSKDAFETAKKKYNRIVADETNAKTLRILGAMRQITAHFKDQATLFMSDVELPKILKKEFSKADWQTVEDYYAKLVDRINEGFCKNAATNVHFLTELLPEESKKQLTEDYFRFAILKEGKNLGVNMKRLREVMFALFVPELTAPETKKRYDSYRAKIYGLTDFLLFKHIHNTKQLEEWVAVLRETSNEDAKENLYDEFARTAWNTVGDSAKQLIENMQSYFTKKEKEITKTAQPVLSTSSIAHTSKKITQFSSFAKLLAFLCNFWEGKEINELLSAYIHKFENIQEFINLLEKLEGKKPQFTENYALFNEAAGQRAGEIAQNLRILASIGKMKPDLGDAKRQLYKAAIEMLGIDTEEYISDEWLEPNMLLAQPPKEPKKDNEKYRKEPHKYSYEKDMETYRKKLREYEETWRSLIDYEYLMPETNPFRNFVAKQVIESRRFMYLVRYTKPKTVRALMSNRAIVHYVLSRIADIQDHHMTESQIDRYYQNLPQYNEQQHKNVSLETKIDALADYLCKYTFEKNVLKQKNGIVLNTKSATKNVEIEHLKALTGLYLTVAYIAVKNLVKANARYYIAFSIFERDYALFEKKLGKDTLEKYVKPFKYIDKGEEKEGKNNFFALTEYLLDKDNSLRYQWNNDLSDEENKQALRKHLDKKEIRSQRHFSQYWLDIFARQIENAKKTSESGYLLTAARNCALHLNVLTALPEFVGEFRKTGDKMTSYFELYHFLLQKLMLAEAGLNLDEYRERIDTYQTACKDLINITYVSLGYNLPRYKNLTCEPLFDEESATGKERQTRLDEKSKEKKQRKGGQK

SEQ ID NO: 230 - DNA, 36 bp, Artificial Sequence
  DR
gtgcagtagccttacagattcgtagggttctgagac

SEQ ID NO: 231 - protein, 971 aa, Artificial Sequence
  Ga0187910_10006931
MIEKKKSYAKGMGLKSTLVSDSKVYMTSFGNGNDARLEKVVENNAISCLVDKKEAFVAEITDKNAGYKIINKKFGHPKGYDVVANNPLYTGPVQQDMLGLKETLEKRYFGSSVSGNDNICIQVIHNILDIEKILAEYITNAAYAVNNIAGLDKDIIGFGKFSTVYTFDEFAEPDRHKERFIKDGKLDTKLINQLKNQYDEFDAFLDDTRFGYFGKAFFCKEGDKYLNKQDNERYHILALLSGLRNWVVHNNEVESKIDRKWLYNLDKNLDKEYITTLDYMYSDIADELTKSFSKNSAANVNYIAEILNIDSKTFAEQYFRFSIMKEQKNLGFTLTKLRECMLDREELSDIRDNHKVFDSIRSKLYTMMDFVIYRYYIEEAKKIENENKTLSDDKKKLSEKDIFIISLRGSFSEEQKDKLYSDEAERLWAKLGKLMLEIKKFRGQMTRDYKKSDTPTLNRILPESEDVSTFSKLMYALTMFLDGKEINELLTTLINKFDNIQSMLKIMPLIGVNAKFSSDYAFFNNSEKIADELKLIKSFARMGEPVANAKRDMMIDAIKILGTDLDDNEIKKLADSFFKDSNGKLLHKGKHGMRNFIINNVVNNKRFHYIIRYGDPAHLHEIAKNEVVVRFVLGRIADIQKKQGKGGKNQIDRYYEICIGNGYGKSVSEKIDALTKVIINMNYDQFEAKRKVIENTGRDNAEREKYKKIISLYLTVIYQILKNLVNVNSRYVIGFHCVERDAQLYKEKGYDINTNNLESKGFTSVTKLCVGIADDDPVKYKNVEIELKERALASFDALEKENPELYEKYNMYSEKQKEAELEKQINREKAKTALNAHLRNTKWNVIIRENIRNTEKDACKQFRNKADHLEVARYAYKYINDISEVNSYFQLYHYIMQRIIIDSSGNNANGMIKKYYESVISDKKYNDRLLKLLCVPFGYCIPRFKNLSIEALFDKNEAAKYDKIKKKVAVR

SEQ ID NO: 232 - DNA, 36 bp, Artificial Sequence
  DR
catgtaaacccctaacaaatggtaggggtttgaaac

SEQ ID NO: 233 - protein, 1105 aa, Artificial Sequence
  Ga0187910_10015336
MENVKNPKEIVKGAKVRFEIYENPKPKKQNQRFSAINVEVITDETHKEAKIQKNEFKTFDQFTKELQETQKVNGETKKEHITKNKHTNVKAAGVKSVFAVDDGNVLITSFGRGNAADIETLKSDDDKTINLTETENQKKYVVTNKRSNVKGLADNPTKVESIIPGETQIGFKSILEKHFFGRTFNDNIHIQIIHNILDIKKILAVHTNNIVYALDNIHERGRENSAEKPIDMIGAGGISTSKEYEQYCSEKSDYEDNFLKQLINNERIAYFGNAFFKDEGNKKVMRTEKEIYYILGMLNEVRNVSTHFTEEDNRDWAKANLYNLSNRLKVGSKEVLNQLYKEKIDKIDANGFVNKGCKRDFSILFKSLNLTTDKDKGELVVGFYDFSIRKNYKNIGFSIKTLREYMLKISNSTLCADTISNNAIRPKAYKLYDFIIWHYYMNKPDKINDFVEKLRTQNKNDEKIKLYYDEAVCLLSELGREIHTMTSCVHNIENTSYEITDKKQKEYYKMQINSLNSADKVSDFSKVIYLVTLFLDGKEINDLLTTLINKFDNIASLLSVLEKQSGKKVEFVENYSFFNSSNLLKEKTLNKSENYTCKIVEELREINSFARMTGDCKIRKSAFEDASQLLGYHDKTVNNLFEVLRLKELESKDWKKRTDDEQQEYDRLLNKHHYFKSGKKLPDTGLRNFIINNVIESRRFNYIVRYADPKKIRKCTENNELLKFAFKDVPDSQVDRYYNICVTNKITNATREEKIERLVDIIKSMNLSKVATVKQRDKQDNVEKQKQLAIMSLYLNILYQIAKNLVYVNSRYVMAFHSLERDSQMLFDAYYDVKRGYCDLSTVLLFGVDDLQNRNRGSYKYLRDNRRSNKDVIETFGDFKGKVSKVVEKKNQGLTNEIYDSLCNVAGTTKTEVQNEIKSILKSNGLDESASSYLSHKLVNKVHSYKYLKQNLDCADNTMINQFRNNVAHLNTIRNMDGIENVTGITSYFQIYHYLMQKALYKEFKKCRENAVRKWIPYITENAEPKYVYWNKKEQQEVEVSFNPKIFGYMENIKNHSNTYCKDFVKALCAPFAYNLPRFKNLSIEELFDMHELSEEPKESMKLTD

SEQ ID NO: 234 - DNA, 36 bp, Artificial Sequence
  DR
gaacgacgtcactacacaccgagaggtgtctaaaac

SEQ ID NO: 235 - protein, 927 aa, Artificial Sequence
  Ga0187910_10040531
MAKKKKAKQRREEQEAARMNKIQSAVKAKAETAPAVSSAFVEKRKDKQSKKTFAKASGLKSTLAVDNSAVMTVFGRGNEAKLDHRINADLQSESLHPQAALKNVHAPNKQKIHFIGRMQDMNLTADHPLHSHDGERAVGADLLCAKDKLEQLYFGRTFNDNIHIQLIYQILDIQKILALHANNIIFALDNLLHKKNDELSDDFVGMGRMRATIGYDAFRNSTNQKVQETYREFQEFVRRKELLYFGSAFYNGDTRRDEKVIYHILSLAASVRQFCFHNDYTSDDGKGFIKADWMYRLEEALPAEYKDTLDALYLEGVEGLDQSFLKNNTVNIQILCSIFNHDDPNKIAEEYYGFLMTKEYKNMGFSIKKLRECMLELPELSGYKEDQYNSVRSKLYKLFDFIIAHYFRKHPEKGEEMVDCLRLCMTEDEKDSHYEGTAKKLVRELAYDMQEAAEQANGSNITQMQKNEQQGKTKGMFAIRDEIRVSRKPVSYFSKVIYVMTLLLDGKEINDLLTTLINKFENIVSFEDVLRQLNVDCTFKPEFAFFGYDRCRNISGELRLINSFARMQKPSAKAKHVMYRDALRILGLDNGMSEEALDQEVRRILQIGADGKPIKNANKGFRNFIASNVIESSRFRYLVRYNNPHKTRMIAQNEAIVRFVLSEIPDEQIRRYYDVCRDPKLPRSSSREAQVDILTGIITDVNYRIFEDVPQSKKINKDRPDANDRMTLKKQRYQAIVSLYLTVMYLVTKNLVYVNSRYVMAFHALERDAYLYGITNIKGDYRKLTDNLLADENYKKFGHFKNKKWRGIAEQNLRNSDVPVIKSFRNMAAHISVIRNIDLYIGDIQKVDSYFALYHFLMQKLIQRVVPENTKGLSDQTKKYYDALEQYNTYCKDFVKAYCTPFAYVTPRYKNLTIDGLFDRNRPGEDK

SEQ ID NO: 236 - DNA, 36 bp, Artificial Sequence
  DR
caactactaccctgccaaatggcagggttcagaaac

SEQ ID NO: 237 - protein, 900 aa, Artificial Sequence
  Ga0187911_10069260
MSTKKRFRYSVAAKAAGLKSSLAVDTDRTVMTSFGHGNAAILEKEIVDGEISVLNIENPAFDAVINDKKYALTGHHAGVHALVDQPQNRSDAVHIRGALEKKYFGDTFADNIHVQIAYNILDITKILTVYANNVVYALNNLVHADDDTQADELDSLGNFSAGTSYAKSKSKSKSKQQDFVELFIKKKEIHGYFGDTFAFLDKRIADADKEKQVYAMLACLGSLRQACSHYRIRYSVNGKNVDADADTWLFSSAQLDQTDPLFSEMLNRIYSHKIKTVNQNFFENNRKANFPILKKMYPETTLKVLMNEYYDFSIRKGYKNFGFSIKSLREALLSPQYESLIGVQIKDNKEYDTVRSKLYQLFDFALTRYFNQHPDMVDAFVVELRSLAKDEDAKNAVYEKYAKAVWNDVKQPIAVMLSYMNGSAIKNIKAFELKPDQKELNGIMNSNALDVPHFCKLVYFLTRFLDGKEINDLLTTLVNKFDNIHSFNQVLTALGLSASYEADYKIFEDSGRVVEYLREINSFARMTVDMEKIKRSAYKKALLILGSSKYSDEDLDARVDEMLGVDYNQNGEKIKVRVDTGFRNFIANNVVESSRFHYLIRYCHPRKIRNLAGNAALIEYQLRRLPELQILRYYEACTEPIKRTARTMDEKIGTLIDLIVKMDFSQFEDVQQNDRVRVFSDAEKKEKIRKMREKQRYQSIISLYLTMLYLIVKNLVNINARYVMAFQAWERDNYLLLQLSGKEAEAEYLNLTRHFIEPLDGAKPYLKKRPVEYLKKDMAMVGNSSIRHFRNATVHLNVIMEAHRYTKDIKYIGSYYALYHYILQRHLLDKIEEDSYAEKTVSEKLWESQISQYGTYSKDFVKALCCPFGYNLPRFKNLSIEQLFDRNESKEITDATAPRQ

SEQ ID NO: 238 - DNA, 36 bp, Artificial Sequence
  DR
gaactacagccctgtgaaataacggggttctaaaac

SEQ ID NO: 239 - protein, 991 aa, Artificial Sequence
  MH0288_GL0082219
MKKMTAKERREQEKQKRAEVIRGKQEANRKKAQAAATQDATAPVHHKNAKSLAKAAGLKSTFTLPTGELLMTSFGRGSEALIQKRIMKDVISDVQEGDPAFSVIPMPKQFEIQGRAIDVQKEGSSVPEVLTDDPRASQKPAGADLIGAKPALEKRYFGKTFTDNIHIQLIYRILDIKKVLAIHANNIVYTLDNLSRREGTEGTDFIGIGGLTLKNSYAAYCEPRTFFDEGKEKNIIENIEKSHGEFLEYMKNPRLAYYGEAFYRRLSNNERSKLGMERYERMSDAQRDAFDRKYPIDFCDGELHFREIEKLAPEYVRKSEKEIYYILAMLSELRQCVFHDSAASRSWLYNLEKVLPAEAMQVLDGVYSQKVAALNNFSKTSSKSNFRLLFNALHADTDAQKKQIAEDFYKFSVRKTYKNIGFSIKLLRESMLDTFAPEYKEKSYDSVRGKLYQLVDFLIWNIYDKNEKMADALVAQLRAEVKRDRDEKSPVYDREAARLWTMIREAVAQTAKTLRAVTLSNNTPGSIKIKELALSKYDRDLVENAIDSAVDERGRRLKITDEASYFSKLIYLLTLFLDGKEINDLITTLVNSFDEIDSFCCVLQKAKLDRGFTEGYRFFAHSAEISQELRAINSFARMTTETVQGKPCMFEDAADLLGMDTDLEEVREALEAFYNKEKMSLKWTKDGQEADTGFRNFIISNVLKSSRFRYVVRYGNPKKLREVMQNEAVVKFVLNDLPEEQINRYSENILGLDAAAKEKKVSELARFLRALSLEDFRDVEQSANAARNARKARYQGAMSLYLNVIYQIIKNMVYINSRYTLAFAKYEHDASLLLDNWVYDPYKTVFSDLTEDSLQKGKLNRRAAKYLQTNLEHSDNTLIRQYRNSVAHLNAVRNMNLYIGDLREITSYFGIYHYIMQRDLITRCQKVKMKNPVVVGYFDKVRTYRTCCKDLVKALNITFGYNLPRYKNLSIEGLFDKNRPGDKKESALIAE

SEQ ID NO: 240 - DNA, 36 bp, Artificial Sequence; identical to SEQ ID NO: 203
  DR

SEQ ID NO: 241 - protein, 925 aa, Artificial Sequence
  O2.UC29-0_GL0096317
MERQKRRKKSCAKMAGVKSTFVIDSDLLMTSFGERDKAVREKYIAQGNVKSLRKQEQAFDAQYGKEKIFVTNADNKLHVAINNPLCGNKKQSPEAQEYSRRVLEHKKAINQKYETIVFGKPSNDNIHIQVVSKIMDIEKTFSFVMGNIVYAINNLDPEQNIDNPIDYMSNKARTDENLKRVLRRCMYLFDLGFEYAEPSPYKKSEQQIEQEREEREKENLETLKKALDVISVMRTDSFHGYDMCNSTSAIVKFPSKKFNLDQKGKNLIYRNAFKYKTDTIKKQYAQNSKVNINFLSYVLYGNGCTEEQKKELSREYFNFAILKQYKNLGFSITSLREQLLSLYDIDFECKRNLRSRANSFCDYVLYYRYAVQFPERIVDLVDKLRCSANEKEKTNVYIEEANRIKEDLRIAFNRINNFDAKSIKLYSTKNNVDDQPMLPFEQVSKDIKGGDAAREKADAFCDMTYYLTQFLDGKEINVFLTTLHNLFENIASFLDVMHKQNISYDFTEQYVMFYDSAYIVKKLETVISVSRMKKALDFYNGQALRDAIRVLGISERHVDMDMKEYVDKYLFDDCKDVKHADHNLRNFIVTNVIKSRKFNYLARYSDMATVSKLSKNKEVVKFVLKRVDPKQIERYYRSVCDVRNISAEDEIEKLVDIIYNFNIDELEQVNNAEIGTGHSGRKVASKRSVQERNQARACVSLYLNVLYQIVKNLMNVNSRYSIAFAMTERDMIVEGKGIEAIETFKDDPDAGKKSKKQIAYRTKYIALTEEYLDKGYIKCATERIKENIKKYGGDPKSIDHIPGEYIKKNLEGYCAGSTNTFRNAVAHLALMARVSEYASDIKNVNSYFSLYHYCMQKHILYCARRFNKQGNEKMAAALNDAEIHRSYSKDAVKFLCLPFAYNLPRYKALTVEGLFDWNEYGQDDD

SEQ ID NO: 242 - DNA, 36 bp, Artificial Sequence
  DR
gtactaagaccttactaaatggtaaggttccaaaac

SEQ ID NO: 243 - protein, 954 aa, Artificial Sequence
  PIG-014_GL0226364
MTKPEKKQIKQATLTKRMGLKSTLVFDNKITVTSFANSSNSEKASAHIEKRTDFWGKTIMQDEKMFRTDVEKQQIYIEKEFPDENNKIITQTAMFENPALRNCGKDYIGMKNSVEKVMFGKEFPNDNLHIQIAYNILDIKKIICPYINNVVNIFYNLGRGKLKDDKNDLLGKQIGPKSEEMVEDLLKNSSAYFVYFGDVFKQVKLSKEQQEKSEEEKRRIWQELWNKNFDHNKNIVNSLIKFRQMCFHQNYENSDKEVSSTALFNIEQFLNKEEKASLDEIYTGAIDKVNCDFNKNSSNNLYILEQIYCNDKNLGQRYYDFVVKKSQCNLGLDTKLIRELLIRKLSDEGLDINDSRYDTYRNKIYTVFGFILYYELTKNETFCQEIVAKLRRFGGDEIEKNKIYNEYFLRKEAVYNQIAEKFKQSVCWFKKEKEKKKEFSSKTKIDLRSVQKIEDQNASVFAKMVYLISRFLDGKEINELCTKLLNKFKNINELVETAKRCGETIEFCPEYKMFKNSAKLAEEMRFVQSVSKMKKLTKKEDKSIKPQVIDDALELLGLKIEKYKKDDQGNFVLDDQNHNVWTDEYKSYRKECFTPKNSDSMNDAEKSFVAKGHQKRNFIISNVVLNKRFLYVAKYGSPTACNQMMKNQKIVRMALESISEDQLRKYARRVYDNKEHFQNQTADEIRENLAKKLKNFNIGAELKTVGNLSEKDFRSSKNALKDKSKSLIGLYLTVAYLITKNMIKINTRFSIAFGAYERDMEFLLQQKKEKGKRFDWLALTQKFLSEDKNYYFEHDLRRKEINKISDRDERKKQHRENDKYYDSCMHFSRHSFEYISKNFAEVQSHPDPLKLFIKYRNNVMHLNIIRDLNDYLPDFKRGKAFEKTDTFYDLYCYCLQKMLLSEVDGFSAINENIDKYCTASKDFMNLLNIIFAYNVPRYKNLSNKELFYRLDSEQ

SEQ ID NO: 244 - DNA, 36 bp, Artificial Sequence
  DR
gtacaaaagccctccagtttggacgggttctaagac

SEQ ID NO: 245 - protein, 941 aa, Artificial Sequence
  PIG-018_GL0023397
MAKKLSPRELREQRERERQAKFAKQVQEREAEKAKREKQVSVSDTVGAAAAVQNENGKKSMAKAAGVKSVFAVGDTVYMTSFGRGNDAVLEKKIVDESHESLNKANPAYEITDISSVNYSVEGHRGQSVCATADNPLHHDGGSSVPTDMLCLKPTLERVYFGKTFDDNLHIQLIYNILDIEKILAIYSTNAVYALNNMIADEDDESSDLFQNMTTDYTYDKFRGRSERIVKSFNDFVSNPRLAYYSDAFYEKKGKGSKRRSEKEIYSMLAMLGKLRHWCVHSESGEAEFWLYKLDSLNGEFIDVLNTLYNRSVNEINRGFVDTNKVNIQILQAVCKNMDLISLIKAYYEFLITKKYKNMGFSIKKLREMMLAETAYTSNPDDRLYDKEINSVRNKLYQMTDFIIYLEYRDNKSIIDTLVSKLRSSVTDEAKEAVYREEAANLRGRLLDAVALIAKSLNGVNIKKLQQNTLEIPDSKLENCFIKSAEKVSAFTKLNYLLTRFINGKEINDLLTTLINKFDNIRSFLETMDELGLERTFTENYRFFEDSQKYRDELIELNSFAKSCSFDISAKRIMYRDALDILGIQAELSEDEIGRMIDNILQLDANGERISKNQRENGLRNFIASNVIDSNRFKYLVRYGNPKKIRETAKCPPAVKFVLDGIPDSQIERYYNSCFPEDTAICSADKKRRELAEMISNISFDWFKDAGNVQRVNAEDKSRNAEIKRKNQAIIRLYLTVMYLMLKNLVNVNSRYVIGFHCVERDAKLYKLSGLTIEGNTDKNRTLLTATILGITSADRAPSGEIVADCDLGRAETAANRHLRKKRWYVQIFNNLKQADRNVINEFRNSVCHLNAIRNINTNIEGIGFVKNYFALYHYLIQRHISSKRISFNSFSAEYISNLEKYHTPSEYFIKAYCTPFAYNLVRYKNLTIDGLFDRNAPSEK

SEQ ID NO: 246 - DNA, 36 bp, Artificial Sequence
  DR
gaactacacccctgttaaattgcaggggtctaaaac

SEQ ID NO: 247 - protein, 948 aa, Artificial Sequence
  PIG-025_GL0099734
MAKKMNAKEQRAAIQAEKNKKIQMANAAREKQAEEARLKAEAERIEKEENKKREAELKRFKLDQETRGKLPKNERKSLAKAAGLKSTFAVGTDLYMTSFGKGNDAIVEKKISNKQVTQINTEKENFTVDTDGITDTIVPVQSKRIACLNTQADNPLYRKDSENQVQPDKLLLKDTLEKVYFGKTFNDTLHIQLIYNILDIQKILTVYSVNTVYTLNNLFGKEISERGDFIGALSFQQTYDDYTSDSKNKEIFEDFYSKRSLGYYGHIFFKDKKKRSKREIYDILALIATIRQWCIHSEEDKKTWIYNAENVLDSEYLDILDDVYGGLVEKINKNFIKDNKVNLILLSDILDMKSKDDFEELIRQYYRFIITKEQKLLGFSITKIREAMLEDTVFKTDKKYDSIRSKLYKLIDFMMFYKYTTVDSEKEHADSIVEKLRATLSGESKEEIYKAEANRIWNLYEDIIMNKIEPALDEGVISGLKKNKSYDNMSIEGIVAEETANVSYFSKIIYLLAQFIDGKEVNDLTTTLINKFDNIRSFIDTANQIGLECNLLDEYQFFNTSDTVKKELHVIKNLTGMGYYDVSIKHQMYKDAIDILGLHDNLSDEEINQLIDTNILFIGADGKPVKMAKGKRGFRNFIISNVLKSSRFRYLVKYCNPKKIRKIANNEKIVKFVLGRITETQIERYYYSCNPELKRAAYPGREAAIDDLTKIIINMKFDDFKNVKQSANVEDSSKEAQEKMKYQTIISLYLTVCYHLVKNLVNINARYAMAFHSLERDARLYGIYGSEKDYVEKLKKEQAVLVEKLLSDGPETAGNLHLRSKKWNRLMRVNLENYSAAASQNFRNAVAHLNPIRNADVLIEGIENITSYFDIYHYIVQRSVLNRTNKTPKMKEYEELINKYHTYNKDFVKALCAPFGYNVVRFKALTIYEMFDRNYPEEKRAEEARKSC

SEQ ID NO: 248 - DNA, 36 bp, Artificial Sequence
  DR
taatatgccctatatcaatttataggggttcagaac

SEQ ID NO: 249 - protein, 894 aa, Artificial Sequence
  PIG-028_GL0185479
MSESDKIKIKSKKTRTKRAGLKSSFVSEGKGLMTAFGKGNNAVIEKRISGDLIENVSNKPRFSVEFGNKEYIINDKKLGIVSDDPRESQKPVGEDGIHCKRALEERYFGKTFNDNIHIQLIYSILDLEKILAVHSNNIVYTFDNLRRKETDEYDDFIGYMSTVNSYEEFISPEKLLPGKEQSVYDNINRSQETFLEYRKNPRLGYFGKVFYEKSTDAKDKNKKKMRLISEKEMYYIFALLGGLRQFCTHDKNRARNWLYSLDTMLNDDAKAVLDKYYVSTVSSLNKHFVENSAKKDFSIIFNALNITDIELKKNIAKEYYEFVCRKNFKNIGFSIKKLREYLLEKPEFRNLKDDKYNSVRSKLYRLIDFIIYLNYKDAKFKNDNDEKIERFVSKLRKCPDEASKETVYQTEADIIKKSISGSINSIKRDMMLVKSKYGKLELDTQTVNQLKRAVDDISINTKGDYFTKLMYLISLLIDGKEINDLLTTLIHQFENIASFIDVMKKENIECEFTEKFAFFKNSEIIAHELRTVNSFARMTGFMENDESTKFIMFREAADILGTSYTDDELTDHLNLKKTRLIARSKADMGLRNFIISNVIKSSRFKYLIRYSNPKKVKAIAENKKLVSFVLDKIPDTQIIRYCNTCGFKVGKRQENINTLAEAITYFSFSNFEKVKQSANVENDTPDAIDKAQKQGLISLYLTVLYLFIKNMVYVNSRYVLAFHCLERDSQLLKITSGYNNLSYNNLTNHFIEKEYLNSHARNYLRVNISNSDEWSIVKFRNGVAHLNSVRNIDTSIKGLREFKSYFEIYAYTVQKSIKNYYDAESPVQINPKTIEYMESVDKYGSYTKDFVKALNTPFGYCLARYKNLSIEPLFDRNTVYNKKDVKEEFAVNSK

SEQ ID NO: 250 - DNA, 36 bp, Artificial Sequence
  DR
gaactatagccctccgatttcggagggttctgaaac

SEQ ID NO: 251 - protein, 980 aa, Artificial Sequence
  Ga0224422_10645759
MDKYKLLRNQKFDYVIKLDNIDNIRPILCKEIVNKILKKLKLDFFFSTKEKEIHFTADDIITKKYKKIELVGDDKEVFPIYVRLREVPLKGKAKRLGLKSIFVEDNKLILTTIGKKDDVLIEKEILNNSKNEVISHINPENYAVQEVNYKNISLANDKLKADIDNPSHSKVEETISIKKDYLERKDVIEKKFFNNTFNDNIHIQLAYNIMDINKIFNIYSNEVVFTMENLAHSDDAKDFIGGIDYKKDVIQNAKFNDYFASIFNSLRYFSQAFPNKTFDKIKIDGEKDYNREEIKKNTKIILRILSMFRQFSIHGYTDLFDMEKDPKIRDLLDYFTARYDEVYNNLIRNFIKTSKTNIAIVFEALNLPINDNGLKKEILNDYFDFSITKSYVNMGFNFKRLKEVLISKLGLNVSDSNKQATYNVINYLIYRHLKDNPIVDKYVKCLVASEGDLDKIAIYDAFADEIKLPLKNIITQELVDNQKRNQKYKYFNIDGSWLNTNFNNIDPFCKAIYFLTIFLDTKEINMLVTSIVNKLRNINGLVKVLNNKSDLIYDYRIFDKGNAQKIADQLSVVLSIARMQKNFNKKFKSDNKNSANKPSSDMIYDAYCLFGYKESKETFDEELEADTSKPSKGIAKFQNKITSAIVNSNKFRFIIKYANPRNCYSIMKNTRVVSFVLKEIPQSQIDKYIIKKEKYNSLNYDAKINALAKELADVSIYGMRKAYNIRAKVEANNLELPKLFMTIIYQVIKSLVRINTYYNIAFSCLERDKKLFNVPDDYCDYSDLMLLDAFVYGTNEFEVSKDGKCECITIDVPLNKYERKVDGKIISVQGTKLGSSKYSWLKDDIDVFKEIFYMNNKPTEIESCSVIYRACYRNTIAHLNAISNMTSYLASFVGRNNRMNSYFELYQYIIQMNFINKYKDNYSNEFIDKQSEILKKYKTYSKDLLHILNLPLAYNMARYKNLTIEDIFYDKFINYIKKSE

SEQ ID NO: 252 - DNA, 36 bp, Artificial Sequence
  DR
ggacaataacctgcgaattttggcaggttctatgac

SEQ ID NO: 253 - protein, 996 aa, Artificial Sequence
  ODAI chimera
MLKKCSVCGKKFETNYQGGKPVCRNCRSNKSKPVNPKSSRKPESIDKAIEILTEKLISDCKKNDCASECGKGRRKSKAKAAGLKSALDLGNGQALITSFGKGNEAVPEKRVEGDKIISLREGEAFALAKEPVNHKLVLKSGRIKAEGGPVEFDGPQKNSSMSAVRLDEYNNQIERKFFRGNKVLQDNIRIQIAHNIMDIEKILAVHINNIVYSVNNLFRVQGNEGDDFLGYRGLDKNYSDFCKNKPEDKERFFNFIGKGDGKVTNPRLSYYGAAFAEKVQPTLKYREAEDIYYIICMLGEARQMFAHGNDDRTKTFLYNIVGYRNGTEINSKFTAVLDGIYSKKVEELNGNFIKNSKKDLTILFSAFGCQDEASKKKLIEKYYDFIVKKTNKNMGFSVTKLREKIIEGYRFRGNPVTGTDYDSVRHKLYRTFDFIICSYYDDHAKEKDTLVSSLRASLNDTKKENLYAGEAKTIAESIKDRMDTVCRMYNKGEGIKHITVDRFIAGAGAGKLIDKCSISTECDYFCKFIYLMTLFIDGKEINDLLTTLINKFDNIDSPSVDKAVNNQNRVEFGDKYDMFNKAGEICESLRSINSFARMESPAPAAKRTMFVDAIRMFGFADVSDNDAEKFYKENIEPFIYDRNGDIEDEWKKGKLVHKKDEKKKGVYNFIATNVIESNRFQYLVRYANTEKIAALARNETIVRFVIKKLPAAQIVRYYIACNRIRENINSNVLTSDDMAESLVKLVTGMDFGKIKGVRNDDRSGDKEMKKAIVTLYLTILYHLTKNLVYVNSRYFMAFHCLERDMNLFGEGQKQALRNTGDYPADNADLRRRDIKYCVLTKAHIKQEEVKSRRNDTDSKSQQKAKSRRRRWCLLLKEDIDKLNGCESLRILYRNAVAHLNIPRNAIDYIGGIKKADSYFAIYHYMMQQYLSKKHGLPEGLGCTHGVYCKDLVKALNAPFGYNLPRFKNLSVEALFDMNEEPAPEGKERSKNADGCN

SEQ ID NO: 254 - DNA, 36 bp, Artificial Sequence; identical to SEQ ID NO: 159
  DR

SEQ ID NO: 255 - protein, 6 aa, Artificial Sequence
  HEPN motif
  SITE (2)..(5): Xaa is any amino acid
RXXXXH

SEQ ID NO: 256 - protein, 11 aa, Artificial Sequence
  N-terminal NLS
SPKKKRKVEAS

SEQ ID NO: 257 - DNA, 33 bp, Artificial Sequence
  N-terminal NLS
agccccaagaagaagagaaaggtggaggccagc

SEQ ID NO: 258 - protein, 11 aa, Artificial Sequence
  C-terminal NLS
GPKKKRKVAAA

SEQ ID NO: 259 - RNA, 20 nt, Artificial Sequence
  dCas9 target
uuaucgucuguuuguggaug

SEQ ID NO: 260 - DNA, 33 bp, Artificial Sequence
  C-terminal NLS
ggacctaagaaaaagaggaaggtggcggccgct

SEQ ID NO: 261 - RNA, 271 nt, Artificial Sequence
  Eubacterium siraeum nCas1 array targeting ccdB
gaacuacacccgugcaaaaaugcaggggucuaaaacuaacggcucucucuuuuauagguguaaaccgaacuacacccgugcaaaaaugcaggggucuaaaaccuuuaucugacagcagacgugcacuggccagaacuacacccgugcaaaaaugcaggggucuaaaaccaucaugcgccagcuuucauccccgauauggaacuacacccgugcaaaaaugcaggggucuaaaacuaauggcguuuuugaugucauuuucgcgguccgcuga

SEQ ID NO: 262 - RNA, 36 nt, Artificial Sequence
  Eubacterium siraeum nCas1 array targeting ccdB - full 36 nt direct repeat
gaacuacacccgugcaaaaaugcaggggucuaaaac

SEQ ID NO: 263 - RNA, 30 nt, Artificial Sequence
  Eubacterium siraeum nCas1 array targeting ccdB - spacer 1
uaacggcucucucuuuuauagguguaaacc

SEQ ID NO: 264 - RNA, 30 nt, Artificial Sequence
  Eubacterium siraeum nCas1 array targeting ccdB - spacer 2
cuuuaucugacagcagacgugcacuggcca

SEQ ID NO: 265 - RNA, 30 nt, Artificial Sequence
  Eubacterium siraeum nCas1 array targeting ccdB - spacer 3
caucaugcgccagcuuucauccccgauaug

SEQ ID NO: 266 - RNA, 37 nt, Artificial Sequence
  Eubacterium siraeum nCas1 array targeting ccdB - spacer 4
uaauggcguuuuugaugucauuuucgcgguccgcuga

SEQ ID NO: 267 - RNA, 268 nt, Artificial Sequence
  uncultured Ruminoccus sp. nCas1 array targeting ccdB
cuacuacacuggugcaaauuugcacuagucuaaaacuaacggcucucucuuuuauagguguaaacccuacuacacuggugcaaauuugcacuagucuaaaaccuuuaucugacagcagacgugcacuggccacuacuacacuggugcaaauuugcacuagucuaaaaccaucaugcgccagcuuucauccccgauaugcuacuacacuggugcaaauuugcacuagucuaaaacuaauggcguuuuugaugucauuuucgcgguccgc

SEQ ID NO: 268 - RNA, 36 nt, Artificial Sequence
  uncultured Ruminoccus sp. nCas1 array targeting ccdB - full 36 nt direct repeat
cuacuacacuggugcaaauuugcacuagucuaaaac

SEQ ID NO: 269 - RNA, 30 nt, Artificial Sequence; identical to SEQ ID NO: 263
  uncultured Ruminoccus sp. nCas1 array targeting ccdB - spacer 1

SEQ ID NO: 270 - RNA, 30 nt, Artificial Sequence; identical to SEQ ID NO: 264
  uncultured Ruminoccus sp. nCas1 array targeting ccdB - spacer 2

SEQ ID NO: 271 - RNA, 30 nt, Artificial Sequence; identical to SEQ ID NO: 265
  uncultured Ruminoccus sp. nCas1 array targeting ccdB - spacer 3

SEQ ID NO: 272 - RNA, 37 nt, Artificial Sequence; identical to SEQ ID NO: 266
  uncultured Ruminoccus sp. nCas1 array targeting ccdB - spacer 4

SEQ ID NO: 273 - RNA, 303 nt, Artificial Sequence
  Target RNA (ccdB sequence)
augcaguuuaagguuuacaccuauaaaagagagagccguuaucgucuguuuguggauguacagagugauauuauugacacgcccgggcgacggauggugaucccccuggccagugcacgucugcugucagauaaagucucccgugaacuuuacccgguggugcauaucggggaugaaagcuggcgcaugaugaccaccgauauggccagugugccggucuccguuaucggggaagaaguggcugaucucagccaccgcgaaaaugacaucaaaaacgccauuaaccugauguuuuggggaaua

SEQ ID NO: 274 - RNA, 30 nt, Artificial Sequence
  Target RNA (ccdB sequence) - spacer 1
gguuuacaccuauaaaagagagagccguua

SEQ ID NO: 275 - RNA, 30 nt, Artificial Sequence
  Target RNA (ccdB sequence) - spacer 2
uggccagugcacgucugcugucagauaaag

SEQ ID NO: 276 - RNA, 30 nt, Artificial Sequence
  Target RNA (ccdB sequence) - spacer 3
cauaucggggaugaaagcuggcgcaugaug

SEQ ID NO: 277 - RNA, 30 nt, Artificial Sequence
  Target RNA (ccdB sequence)
accgcgaaaaugacaucaaaaacgccauua

SEQ ID NO: 278 - protein, 915 aa, Artificial Sequence
  Mutated Cas13d sequence, NLS-Ga_0531(trunc)-NLS-HA
MSPKKKRKVEASKQSKKTFAKASGLKSTLAVDNSAVMTVFGRGNEAKLDHRINADLQSESLHPQAALKNVHAPNKQKIHFIGRMQDMNLTADHPLHSHDGERAVGADLLCAKDKLEQLYFGRTFNDNIHIQLIYQILDIQKILALHANNIIFALDNLLHKKNDELSDDFVGMGRMRATIGYDAFRNSTNQKVQETYREFQEFVRRKELLYFGSAFYNGDTRRDEKVIYHILSLAASVRQFCFHNDYTSDDGKGFIKADWMYRLEEALPAEYKDTLDALYLEGVEGLDQSFLKNNTVNIQILCSIFNHDDPNKIAEEYYGFLMTKEYKNMGFSIKKLRECMLELPELSGYKEDQYNSVRSKLYKLFDFIIAHYFRKHPEKGEEMVDCLRLCMTEDEKDSHYEGTAKKLVRELAYDMQEAAEQANGSNITQMQKNEQQGKTKGMFAIRDEIRVSRKPVSYFSKVIYVMTLLLDGKEINDLLTTLINKFENIVSFEDVLRQLNVDCTFKPEFAFFGYDRCRNISGELRLINSFARMQKPSAKAKHVMYRDALRILGLDNGMSEEALDQEVRRILQIGADGKPIKNANKGFRNFIASNVIESSRFRYLVRYNNPHKTRMIAQNEAIVRFVLSEIPDEQIRRYYDVCRDPKLPRSSSREAQVDILTGIITDVNYRIFEDVPQSKKINKDRPDANDRMTLKKQRYQAIVSLYLTVMYLVTKNLVYVNSRYVMAFHALERDAYLYGITNIKGDYRKLTDNLLADENYKKFGHFKNKKWRGIAEQNLRNSDVPVIKSFRNMAAHISVIRNIDLYIGDIQKVDSYFALYHFLMQKLIQRVVPENTKGLSDQTKKYYDALEQYNTYCKDFVKAYCTPFAYVTPRYKNLTIDGLFDRNRPGEDKGSGPKKKRKVAAAYPYDVPDYA

SEQ ID NO: 279 - protein, 919 aa, Artificial Sequence
  Mutated Cas13d sequence, NES-Ga_0531(trunc)-NES-HA
MLQLPPLERLTLGSGKQSKKTFAKASGLKSTLAVDNSAVMTVFGRGNEAKLDHRINADLQSESLHPQAALKNVHAPNKQKIHFIGRMQDMNLTADHPLHSHDGERAVGADLLCAKDKLEQLYFGRTFNDNIHIQLIYQILDIQKILALHANNIIFALDNLLHKKNDELSDDFVGMGRMRATIGYDAFRNSTNQKVQETYREFQEFVRRKELLYFGSAFYNGDTRRDEKVIYHILSLAASVRQFCFHNDYTSDDGKGFIKADWMYRLEEALPAEYKDTLDALYLEGVEGLDQSFLKNNTVNIQILCSIFNHDDPNKIAEEYYGFLMTKEYKNMGFSIKKLRECMLELPELSGYKEDQYNSVRSKLYKLFDFIIAHYFRKHPEKGEEMVDCLRLCMTEDEKDSHYEGTAKKLVRELAYDMQEAAEQANGSNITQMQKNEQQGKTKGMFAIRDEIRVSRKPVSYFSKVIYVMTLLLDGKEINDLLTTLINKFENIVSFEDVLRQLNVDCTFKPEFAFFGYDRCRNISGELRLINSFARMQKPSAKAKHVMYRDALRILGLDNGMSEEALDQEVRRILQIGADGKPIKNANKGFRNFIASNVIESSRFRYLVRYNNPHKTRMIAQNEAIVRFVLSEIPDEQIRRYYDVCRDPKLPRSSSREAQVDILTGIITDVNYRIFEDVPQSKKINKDRPDANDRMTLKKQRYQAIVSLYLTVMYLVTKNLVYVNSRYVMAFHALERDAYLYGITNIKGDYRKLTDNLLADENYKKFGHFKNKKWRGIAEQNLRNSDVPVIKSFRNMAAHISVIRNIDLYIGDIQKVDSYFALYHFLMQKLIQRVVPENTKGLSDQTKKYYDALEQYNTYCKDFVKAYCTPFAYVTPRYKNLTIDGLFDRNRPGEDKGSGLQLPPLERLTLYPYDVPDYA

SEQ ID NO: 280 - protein, 1000 aa, Artificial Sequence
  Mutated Cas13d sequence, NLS-RfxCas13d-NLS-HA
MSPKKKRKVEASIEKKKSFAKGMGVKSTLVSGSKVYMTTFAEGSDARLEKIVEGDSIRSVNEGEAFSAEMADKNAGYKIGNAKFSHPKGYAVVANNPLYTGPVQQDMLGLKETLEKRYFGESADGNDNICIQVIHNILDIEKILAEYITNAAYAVNNISGLDKDIIGFGKFSTVYTYDEFKDPEHHRAAFNNNDKLINAIKAQYDEFDNFLDNPRLGYFGQAFFSKEGRNYIINYGNECYDILALLSGLRHWVVHNNEEESRISRTWLYNLDKNLDNEYISTLNYLYDRITNELTNSFSKNSAANVNYIAETLGINPAEFAEQYFRFSIMKEQKNLGFNITKLREVMLDRKDMSEIRKNHKVFDSIRTKVYTMMDFVIYRYYIEEDAKVAAANKSLPDNEKSLSEKDIFVINLRGSFNDDQKDALYYDEANRIWRKLENIMHNIKEFRGNKTREYKKKDAPRLPRILPAGRDVSAFSKLMYALTMFLDGKEINDLLTTLINKFDNIQSFLKVMPLIGVNAKFVEEYAFFKDSAKIADELRLIKSFARMGEPIADARRAMYIDAIRILGTNLSYDELKALADTFSLDENGNKLKKGKHGMRNFIINNVISNKRFHYLIRYGDPAHLHEIAKNEAVVKFVLGRIADIQKKQGQNGKNQIDRYYETCIGKDKGKSVSEKVDALTKIITGMNYDQFDKKRSVIEDTGRENAEREKFKKIISLYLTVIYHILKNIVNINARYVIGFHCVERDAQLYKEKGYDINLKKLEEKGFSSVTKLCAGIDETAPDKRKDVEKEMAERAKESIDSLESANPKLYANYIKYSDEKKAEEFTRQINREKAKTALNAYLRNTKWNVIIREDLLRIDNKTCTLFRNKAVHLEVARYVHAYINDIAEVNSYFQLYHYIMQRIIMNERYEKSSGKVSEYFDAVNDEKKYNDRLLKLLCVPFGYCIPRFKNLSIEALFDRNEAAKFDKEKKKVSGNSGSGPKKKRKVAAAYPYDVPDYA

SEQ ID NO: 281 - protein, 980 aa, Artificial Sequence
  Mutated Cas13d sequence, NLS-RfxCas13d(del5)-NLS-HA
MSPKKKRKVEASIEKKKSFAKGMGVKSTLVSGSKVYMTTFAEGSDARLEKIVEGDSIRSVNEGEAFSAEMADKNAGYKIGNAKFSHPKGYAVVANNPLYTGPVQQDMLGLKETLEKRYFGESADGNDNICIQVIHNILDIEKILAEYITNAAYAVNNISGLDKDIIGFGKFSTVYTYDEFKDPEHHRAAFNNNDKLINAIKAQYDEFDNFLDNPRLGYFGQAFFSKEGRNYIINYGNECYDILALLSGLRHWVVHNNEEESRISRTWLYNLDKNLDNEYISTLNYLYDRITNELTNSFSKNSAANVNYIAETLGINPAEFAEQYFRFSIMKEQKNLGFNITKLREVMLDRKDMSEIRKNHKVFDSIRTKVYTMMDFVIYRYYIEEDAKVAAANKSLPDNEKSLSEKDIFVINLRGSFNDDQKDALYYDEANRIWRKLENIMHNIKEFRGNKTREYKKKDAPRLPRILPAGRDVSAFSKLMYALTMFLDGKEINDLLTTLINKFDNIQSFLKVMPLIGVNAKFVEEYAFFKDSAKIADELRLIKSFARMGEPIADARRAMYIDAIRILGGGGGSGGGGSMRNFIINNVISNKRFHYLIRYGDPAHLHEIAKNEAVVKFVLGRIADIQKKQGQNGKNQIDRYYETCIGKDKGKSVSEKVDALTKIITGMNYDQFDKKRSVIEDTGRENAEREKFKKIISLYLTVIYHILKNIVNINARYVIGFHCVERDAQLYKEKGYDINLKKLEEKGFSSVTKLCAGIDETAPDKRKDVEKEMAERAKESIDSLESANPKLYANYIKYSDEKKAEEFTRQINREKAKTALNAYLRNTKWNVIIREDLLRIDNKTCTLFRNKAVHLEVARYVHAYINDIAEVNSYFQLYHYIMQRIIMNERYEKSSGKVSEYFDAVNDEKKYNDRLLKLLCVPFGYCIPRFKNLSIEALFDRNEAAKFDKEKKKVSGNSGSGPKKKRKVAAAYPYDVPDYA

SEQ ID NO: 282 - protein, 965 aa, Artificial Sequence
  Mutated Cas13d sequence, NLS-RfxCas13d(del5.12)-NLS-HA
MSPKKKRKVEASIEKKKSFAKGMGVKSTLVSGSKVYMTTFAEGSDARLEKIVEGDSIRSVNEGEAFSAEMADKNAGYKIGNAKFSHPKGYAVVANNPLYTGPVQQDMLGLKETLEKRYFGESADGNDNICIQVIHNILDIEKILAEYITNAAYAVNNISGLDKDIIGFGKFSTVYTYDEFKDPEHHRAAFNNNDKLINAIKAQYDEFDNFLDNPRLGYFGQAFFSKEGRNYIINYGNECYDILALLSGLRHWVVHNNEEESRISRTWLYNLDKNLDNEYISTLNYLYDRITNELTNSFSKNSAANVNYIAETLGINPAEFAEQYFRFSIMKEQKNLGFNITKLREVMLDRKDMSEIRKNHKVFDSIRTKVYTMMDFVIYRYYIEEDAKVAAANKSLPDNEKSLSEKDIFVINLRGSFNDDQKDALYYDEANRIWRKLENIMHNIKEFRGNKTREYKKKDAPRLPRILPAGRDVSAFSKLMYALTMFLDGKEINDLLTTLINKFDNIQSFLKVMPLIGVNAKFVEEYAFFKDSAKIADELRLIKSFARMGEPIADARRAMYIDAIRILGGGGGSGGGGSMRNFIINNVISNKRFHYLIRYGDPAHLHEIAKNEAVVKFVLGRIADIQKKQGQNGKNQIDRYYETCIGKDKGKSVSEKVDALTKIITGMNYDQFDKKRSVIEDTGRENAEREKFKKIISLYLTVIYHILKNIVNINARYVIGFHCVERDAQLYKEKGYDINLKKLEEKGFSSVTKLCAGIDETAPDKRKDVEKEMAERAKESIDSLESANPKLYANYIKYSDEKKAEEFTRQINREKAKTALNAYLRNTKWNVIIREDLLRIDNKTCTLFRNKAVHLEVARYVHAYINDIAEVNSYFQLYHYIMQRIIMNERYEKSSGKVSEYFDAVNDEKKYNDRLLKLLCVPFGYCIPRFKNLSIEALFDRNEGSGPKKKRKVAAAYPYDVPDYA

SEQ ID NO: 283 - protein, 963 aa, Artificial Sequence
  Mutated Cas13d sequence, NLS-RfxCas13d(del5.13)-NLS-HA
MSPKKKRKVEASIEKKKSFAKGMGVKSTLVSGSKVYMTTFAEGSDARLEKIVEGDSIRSVNEGEAFSAEMADKNAGYKIGNAKFSHPKGYAVVANNPLYTGPVQQDMLGLKETLEKRYFGESADGNDNICIQVIHNILDIEKILAEYITNAAYAVNNISGLDKDIIGFGKFSTVYTYDEFKDPEHHRAAFNNNDKLINAIKAQYDEFDNFLDNPRLGYFGQAFFSKEGRNYIINYGNECYDILALLSGLRHWVVHNNEEESRISRTWLYNLDKNLDNEYISTLNYLYDRITNELTNSFSKNSAANVNYIAETLGINPAEFAEQYFRFSIMKEQKNLGFNITKLREVMLDRKDMSEIRKNHKVFDSIRTKVYTMMDFVIYRYYIEEDSEKDIFVINLRGSFNDDQKDALYYDEANRIWRKLENIMHNIKEFRGNKTREYKKKDAPRLPRILPAGRDVSAFSKLMYALTMFLDGKEINDLLTTLINKFDNIQSFLKVMPLIGVNAKFVEEYAFFKDSAKIADELRLIKSFARMGEPIADARRAMYIDAIRILGGGGGSGGGGSMRNFIINNVISNKRFHYLIRYGDPAHLHEIAKNEAVVKFVLGRIADIQKKQGQNGKNQIDRYYETCIGKDKGKSVSEKVDALTKIITGMNYDQFDKKRSVIEDTGRENAEREKFKKIISLYLTVIYHILKNIVNINARYVIGFHCVERDAQLYKEKGYDINLKKLEEKGFSSVTKLCAGIDETAPDKRKDVEKEMAERAKESIDSLESANPKLYANYIKYSDEKKAEEFTRQINREKAKTALNAYLRNTKWNVIIREDLLRIDNKTCTLFRNKAVHLEVARYVHAYINDIAEVNSYFQLYHYIMQRIIMNERYEKSSGKVSEYFDAVNDEKKYNDRLLKLLCVPFGYCIPRFKNLSIEALFDRNEAAKFDKEKKKVSGNSGSGPKKKRKVAAAYPYDVPDYA

SEQ ID NO: 284 - protein, 948 aa, Artificial Sequence
  Mutated Cas13d sequence, NLS-RfxCas13d(del5.12+5.13)-NLS-HA
MSPKKKRKVEASIEKKKSFAKGMGVKSTLVSGSKVYMTTFAEGSDARLEKIVEGDSIRSVNEGEAFSAEMADKNAGYKIGNAKFSHPKGYAVVANNPLYTGPVQQDMLGLKETLEKRYFGESADGNDNICIQVIHNILDIEKILAEYITNAAYAVNNISGLDKDIIGFGKFSTVYTYDEFKDPEHHRAAFNNNDKLINAIKAQYDEFDNFLDNPRLGYFGQAFFSKEGRNYIINYGNECYDILALLSGLRHWVVHNNEEESRISRTWLYNLDKNLDNEYISTLNYLYDRITNELTNSFSKNSAANVNYIAETLGINPAEFAEQYFRFSIMKEQKNLGFNITKLREVMLDRKDMSEIRKNHKVFDSIRTKVYTMMDFVIYRYYIEEDSEKDIFVINLRGSFNDDQKDALYYDEANRIWRKLENIMHNIKEFRGNKTREYKKKDAPRLPRILPAGRDVSAFSKLMYALTMFLDGKEINDLLTTLINKFDNIQSFLKVMPLIGVNAKFVEEYAFFKDSAKIADELRLIKSFARMGEPIADARRAMYIDAIRILGGGGGSGGGGSMRNFIINNVISNKRFHYLIRYGDPAHLHEIAKNEAVVKFVLGRIADIQKKQGQNGKNQIDRYYETCIGKDKGKSVSEKVDALTKIITGMNYDQFDKKRSVIEDTGRENAEREKFKKIISLYLTVIYHILKNIVNINARYVIGFHCVERDAQLYKEKGYDINLKKLEEKGFSSVTKLCAGIDETAPDKRKDVEKEMAERAKESIDSLESANPKLYANYIKYSDEKKAEEFTRQINREKAKTALNAYLRNTKWNVIIREDLLRIDNKTCTLFRNKAVHLEVARYVHAYINDIAEVNSYFQLYHYIMQRIIMNERYEKSSGKVSEYFDAVNDEKKYNDRLLKLLCVPFGYCIPRFKNLSIEALFDRNEGSGPKKKRKVAAAYPYDVPDYA

SEQ ID NO: 285 - protein, 983 aa, Artificial Sequence
  Mutated Cas13d sequence, NLS-RfxCas13d(del13)-NLS-HA
MSPKKKRKVEASIEKKKSFAKGMGVKSTLVSGSKVYMTTFAEGSDARLEKIVEGDSIRSVNEGEAFSAEMADKNAGYKIGNAKFSHPKGYAVVANNPLYTGPVQQDMLGLKETLEKRYFGESADGNDNICIQVIHNILDIEKILAEYITNAAYAVNNISGLDKDIIGFGKFSTVYTYDEFKDPEHHRAAFNNNDKLINAIKAQYDEFDNFLDNPRLGYFGQAFFSKEGRNYIINYGNECYDILALLSGLRHWVVHNNEEESRISRTWLYNLDKNLDNEYISTLNYLYDRITNELTNSFSKNSAANVNYIAETLGINPAEFAEQYFRFSIMKEQKNLGFNITKLREVMLDRKDMSEIRKNHKVFDSIRTKVYTMMDFVIYRYYIEEDSEKDIFVINLRGSFNDDQKDALYYDEANRIWRKLENIMHNIKEFRGNKTREYKKKDAPRLPRILPAGRDVSAFSKLMYALTMFLDGKEINDLLTTLINKFDNIQSFLKVMPLIGVNAKFVEEYAFFKDSAKIADELRLIKSFARMGEPIADARRAMYIDAIRILGTNLSYDELKALADTFSLDENGNKLKKGKHGMRNFIINNVISNKRFHYLIRYGDPAHLHEIAKNEAVVKFVLGRIADIQKKQGQNGKNQIDRYYETCIGKDKGKSVSEKVDALTKIITGMNYDQFDKKRSVIEDTGRENAEREKFKKIISLYLTVIYHILKNIVNINARYVIGFHCVERDAQLYKEKGYDINLKKLEEKGFSSVTKLCAGIDETAPDKRKDVEKEMAERAKESIDSLESANPKLYANYIKYSDEKKAEEFTRQINREKAKTALNAYLRNTKWNVIIREDLLRIDNKTCTLFRNKAVHLEVARYVHAYINDIAEVNSYFQLYHYIMQRIIMNERYEKSSGKVSEYFDAVNDEKKYNDRLLKLLCVPFGYCIPRFKNLSIEALFDRNEAAKFDKEKKKVSGNSGSGPKKKRKVAAAYPYDVPDYA

SEQ ID NO: 286 - protein, 1378 aa, Artificial Sequence
  Effector sequence used to edit ADAR2 expression
MIEKKKSFAKGMGVKSTLVSGSKVYMTTFAEGSDARLEKIVEGDSIRSVNEGEAFSAEMADKNAGYKIGNAKFSHPKGYAVVANNPLYTGPVQQDMLGLKETLEKRYFGESADGNDNICIQVIHNILDIEKILAEYITNAAYAVNNISGLDKDIIGFGKFSTVYTYDEFKDPEHHRAAFNNNDKLINAIKAQYDEFDNFLDNPRLGYFGQAFFSKEGRNYIINYGNECYDILALLSGLRHWVVHNNEEESRISRTWLYNLDKNLDNEYISTLNYLYDRITNELTNSFSKNSAANVNYIAETLGINPAEFAEQYFRFSIMKEQKNLGFNITKLREVMLDRKDMSEIRKNHKVFDSIRTKVYTMMDFVIYRYYIEEDAKVAAANKSLPDNEKSLSEKDIFVINLRGSFNDDQKDALYYDEANRIWRKLENIMHNIKEFRGNKTREYKKKDAPRLPRILPAGRDVSAFSKLMYALTMFLDGKEINDLLTTLINKFDNIQSFLKVMPLIGVNAKFVEEYAFFKDSAKIADELRLIKSFARMGEPIADARRAMYIDAIRILGTNLSYDELKALADTFSLDENGNKLKKGKHGMRNFIINNVISNKRFHYLIRYGDPAHLHEIAKNEAVVKFVLGRIADIQKKQGQNGKNQIDRYYETCIGKDKGKSVSEKVDALTKIITGMNYDQFDKKRSVIEDTGRENAEREKFKKIISLYLTVIYHILKNIVNINARYVIGFHCVERDAQLYKEKGYDINLKKLEEKGFSSVTKLCAGIDETAPDKRKDVEKEMAERAKESIDSLESANPKLYANYIKYSDEKKAEEFTRQINREKAKTALNAYLRNTKWNVIIREDLLRIDNKTCTLFRNKAVALEVARYVHAYINDIAEVNSYFQLYHYIMQRIIMNERYEKSSGKVSEYFDAVNDEKKYNDRLLKLLCVPFGYCIPRFKNLSIEALFDRNEAAKFDKEKKKVSGNSSRGSGPKKKRKVAAAYPYDVPDYAGSQLHLPQVLADAVSRLVLGKFGDLTDNFSSPHARRKVLAGVVMTTGTDVKDAKVISVSTGTKCINGEYMSDRGLALNDCHAEIISRRSLLRFLYTQLELYLNNKDDQKRSIFQKSERGGFRLKENVQFHLYISTSPCGDARIFSPHEPILEEPADRHPNRKARGQLRTKIESGQGTIPVRSNASIQTWDGVLQGERLLTMSCSDKIARWNVVGIQGSLLSIFVEPIYFSSIILGSLYHGDHLSRAMYQRISNIEDLPPLYTLNKPLLSGISNAEARQPGKAPNFSVNWTVGDSAIEVINATTGKDELGRASRLCKHALYCRWMRVHGKVPSHLLRSKITKPNVYHESKLAAKEYQAAKARLFTAFIKAGLGAWVEKPTEQDQFSLT

SEQ ID NO: 287 - protein, 11 aa, Artificial Sequence
  HIV NES
LQLPPLERLTL

SEQ ID NO: 288 - protein, 26 aa, Artificial Sequence
  Cas sequence
  SITE (2)..(2): Xaa is any amino acid
  SITE (8)..(12): Xaa is any amino acid
  SITE (15)..(15): Xaa is any amino acid
  SITE (18)..(19): Xaa is any amino acid
  SITE (21)..(26): Xaa is any amino acid
LXGKEINXXXXXLIXKFXXIXXXXXX

SEQ ID NO: 289 - protein, 50 aa, Artificial Sequence
  Cas sequence
  SITE (3)..(3): Xaa is any amino acid
  SITE (5)..(6): Xaa is any amino acid
  SITE (9)..(13): Xaa is any amino acid
  SITE (15)..(15): Xaa is any amino acid
  SITE (17)..(31): Xaa is any amino acid
  SITE (33)..(38): Xaa is any amino acid
  SITE (41)..(50): Xaa is any amino acid
RNXIXXNVXXXXXFXYXXXXXXXXXXXXXXXNXXXXXXVLXXXXXXXXXX

SEQ ID NO: 290 - protein, 33 aa, Artificial Sequence
  Cas sequence
  SITE (2)..(6): Xaa is any amino acid
  SITE (8)..(10): Xaa is any amino acid
  SITE (12)..(13): Xaa is any amino acid
  SITE (15)..(16): Xaa is any amino acid
  SITE (18)..(18): Xaa is any amino acid
  SITE (20)..(27): Xaa is any amino acid
  SITE (31)..(33): Xaa is any amino acid
LXXXXXYXXXKXXVXXNXRXXXXXXXXERDXXX

SEQ ID NO: 291 - protein, 21 aa, Artificial Sequence
  Cas sequence
  SITE (3)..(3): Xaa is any amino acid
  SITE (5)..(7): Xaa is any amino acid
  SITE (9)..(9): Xaa is any amino acid
  SITE (13)..(16): Xaa is any amino acid
  SITE (19)..(21): Xaa is any amino acid
PFXYXXXRXKNLXXXXLFXXX

SEQ ID NO: 292 - protein, 1057 aa, Artificial Sequence
  MH_4866
MEENKVRFTNTSNVKRPKSLLKQMGHKSTFLLDDTLIVTSVAKGKNEDQKGKEQAASKSKVAPQSHIELLSTIDGEVLGGRKELLATTVSRQEVTISGKIYNLNTKTPESTTVTMANPAVLLQKNSSTTQVARKTDYLGIKSALEKEFFNDFSNSGFNDNVRVQIAYNILDIRKILATTINNIVSMFYNLDRTTGDIADETKKSTNTDIIGMIKTYLKYDQAKNSNDPSIKKTFNKAEELLINTKAYHTYFDRLFTTPTRQAFKAGKLKDTNDKKSNLPCEFSKLSEKDQEEFKNEAITHNYDVLRLLGLGRQLVVHEKYKSDEHNKDNSIESLFNIDKIIRNSNDTMDLLKRLDNIYLESAEQIDNSFKKSSATNCLILEELYKRIGKAKTQAELYKDYYRYAILKEDQCLGISFNRIKEAVLEKLKEEQRYKNFEYRNDNKRFYTLCNFVLWHYMVDLRDRNETRAGHQQTDRNEIEELKSKLRACCDNNGDGGENQKYAIYKEFVNFHWTDLRTSINTLYDLCVKYKYTAKNYRIDSKIQIDNQLSSSANNVKTFVKYIYFLSEFLDGKEVNVFFNELVEKFSNIAEIVTTVNDNINNSSKKSPNISFLPQYSLFQEAGTVADQLRNARNIKHATLRARINDKVADKDSKMSPSKQTISDALYMLIDENDTIENYKQLIWDEKESGTWVKKATGNNKVRNFIINNIIMSKWFMYISKYSDPRNCSKIMHNKEAVVFAMSSIPDAQIEKYYKRVTAKSVQYGNKTAEEMRSIVIDALMNFSLKPVLTGVANNDYSNENRERDIGIIQLYLTVAYIVTKSLVNVNKRFLLAFSCLERDVPLILNGKSFKDANILVLSEKFIAEDQEIEQKYKLAKKNRITPNMSKEDVKNVFKELNAEYKSKHYAESLTRPRDPDSKKDKSCAYLVNNLNEAKKIENVLMDFKNKVDHLNVVKSAPEYMSNIKNIDSFYGIFCFALQNILADKMIKWSVNEKNSKEDVEIINSYGQELKKKLDSRHTFDRDAMWIINMPFAYNFPRYKNLSSEYLFYDKEYEKTKK

SEQ ID NO: 293 - protein, 945 aa, Artificial Sequence
  037_-_emb|OIZA01000315.1|  compressed
MAKKKRMTAKERKQNHRESLMKKADSNAEKEKAKKPVVENKPDTAISKDNKPKPNKEIKKSKAKLAGVKWIIKANDDVTYISSFGKGNNSVLEKRIIGDVSGDVNKDSHMYVNPKYTKKNYEIKNGFSSGSSLVTYPNKPDKNSGMDALCLKPYFEIDFFGHIFTDNMHIQAIYNIFDIEKILAKHITNIIYTVNSFDRNYNQSGNDTIGFDLNYRVPYLEYGGGKDSNGKPNKISAWKKRENFINFYNEAKPHLGYYENIFYDHGEPISEEKFYNYLNILNFIRNNTFHYKDNDIELYSENYSEEYVFINCLNEFVKNKFKNVNKNFISNEKNNLYIILKAYGEDTENVEVVKKYSKELYKLSVLKTNKNLGVNVKKLRESAIEYGYCPLPYDKEKEVAKLSSVKHKLYKTYDFVITHYLNSNDKLLLEIVETLRLSKNDDEKENVYKKYAEKLFKADDVINPIKAISKLFAEKGNKLFKEKIIIKKEYIEDVSIDKNIYDFTKVIFFMTCFLDGKEINDLLTNIISKLQVIEDHNNVIKFIFHNKDAVYKDYSDKYAIFRNAGKIATELEAIKSIARMENKIENAPKEPLLKDALLALGVSSNDFDEKYEKYFKTDVDADKDHQKVSTFLMNNVINNSRFKYVVKYINPADINGLAKNRYLVKFVLSKIPEEQIDSYYKLFSNEEEPSCEEKIKLLTKKISKLNFQTLFENNKIPNVEKERKKAIITLYFTIVYILVKNLVNINGLYTLALYFVERDGFFYKQICEKKLIETLKKKDKKQLYNDDDYLLLPEIFSGSKYREETKNLKLPKEKDRDIMKKYLPNDKDREEYNKFFKQYRNNIVHLKIIAKLSELTKNIDKDINSYFDIYHYCTQRVMFDYCKKNNNVVLAKMKDLAHIKSDCDEFSSKHTYPYSSAVLRFMNLPFAYNVPRFKNLSYKKFFDKQ

SEQ ID NO: 294 - protein, 924 aa, Artificial Sequence
  PIG-022_GL0026351 compressed
MAESYKIKSKKTRTKRAGLKSSFVNENKGLMTAFGKGNNAVIEKRISGNLIENVSNKPRFSVEFGNKEYIINDKKLGIVSDDPRESQKPVGEDGIHCKRALEERYFGKTFNDNIHIQLIYSILDLEKILAVHSNNIVYTFDNLRRKETDEYDDFIGYMSTVNSYEEFMNPEKLLPGKDQSVYDNINRSRETFLEYRKNPRLGYFGKVFYEKVTDPKNKSKKKMRLISEKEMYYIFALLGGLRQFCTHDKNRARNWLYSLDTMLNDDAKAVLDKYYVSTVSSLNKHFVDNSAKKDFSIIFNALNITDIELKKNIAKEYYEFVCRKNFKNIGFSIKKLREYLLEKPEFCNLKEDKYNSVRSKLYRLIDFIIYLNYKDAKFENDNDEKIERFVSKLRKCPDEASKETVYQTESDIIKKSIYGSINSIKRGMMSVKSKYGKLELDKQTINQLKRAVDDISINTKGDYFTKLMYLISLLIDGKEINDLLTTLIHQFENIASFIDVMKKENINYEFAEKYKFFNTSKNIACELRTVNSFARMTGFMENDESTKFIMFREAADILGTSYTDDELTDHLNLKKTRLNARSKADTGLRNFIISNVIKSSRFKYLIRYSNPKKVKAIAENKKLVRFVLDKIPDPQIIRYCNTCGFKVGERQENINTLAKAITNFSFSAFEKVKQSANVENDTPDAIDKAQKQGLISLYLTVLYLFIKNMVYVNSRYVLAFHCLERDSQLLKITSGYNNSSYNNLTNYFIDNKYLNPHASRYLKVNISNADEWSIVKFRNGTAHLNSVRNIDTCIEGLKDFKSYFEIYAYTVQKSIKKYFDAEFSEDRNIEDGKISLCNGVYIHERQKNGKPKITVKINPKTIEYMESVDKYGSYTKDFVKALNTPFGYCLARYKNLSIEPLFDRNTVYNKEDVTEEFSVNSKEQ

SEQ ID NO: 295 - protein, 1022 aa, Artificial Sequence
  PIG-046_GL0077813 compressed
MAKKITAKQRREERERQNKQKWAKKQDDATAVFECEANIKPADSKDEDCANTSIKRKKTQAKAMGLKTVLGFDNKIAIASFTSSKDSKSSHIERITDPNGKTIREDVRMFDSNVDECSINLEKRMTVEERQKDGTIKKDEKDVKSTICNPYSNECGKDYIGIKSVAEELFFGRTFPNDNLRVQIAYNIFDIQKIFGTYINNIIYSFYNLSRDEFQSDNDVIGTLYMLKDFDGQKETDTFRQARALLERTEAYYSYFDNVFKKIDKKKKRNDDYEGKRNEILRYNFNVLRVLSFLRQICAHAKVKVSSDNDREKGGVFVDSLDALFNISSFFDAVAPELNEVINSVYSKGIYDINDNFVKNDKNNFYILSKIYPEVARENLLKEYYYFVVSKEGNNIGISTKKLKEAIIAQDMSYIKSKDYDTYRNKLYTVLCFILVKELNERTTIREQMVADLRANMNGDIGREDIYSKYAKIIYAQVKPRFDGMKNVFEEEAKGVIVPDKEEAVKFSNGALDKSEIERFCITSANTDSVAKIIYFLCKFLDGKEINEFCCAMMNKLDGINDLMETAEQCGAKIEFVDNFNVLSKCGTISGQIRVVKSISKMKKEIDVDNETIFLDAFELLGKRIEKYKKDDSGNVLRNDDGKVLRTKEYNNIRKMLCKKDRRLNFIANSIIKNKWFSYIVRYNQPSECQAIMKNKTLVKFALDELPDLQIQRYFVALYGDEDLPSYGEMRKILLKKLHDFSIRDFDEEIGSLFDEMKRKDKFCESDRKKCLFRLYLTIAYLITKSMVKINTRFSIACATYERDYALLCASNKQERAWSSGATALALTRKFLNQDKLIFEKHYAREGEISKLPKEERKAMRKVNDQLLKQTHFSKHSYCYIVDNVNRLTGGECRTDKRVLPVLNEKNDNAGILSDFRKTIAHLNVVHKMVDYVAEIKGITSYYAFFCYVLQRMPVGNKNEKNALKEKYSETAKSYGTYSKDFMWLINLPFAYNLPRYKNLSNEQLFYDEEERNETEGQIDRL

SEQ ID NO: 296 - protein, 1027 aa, Artificial Sequence; identical to SEQ ID NO: 170
  pig_chimera compressed

SEQ ID NO: 297 - protein, 966 aa, Ruminococcus flavefaciens
IEKKKSFAKGMGVKSTLVSGSKVYMTTFAEGSDARLEKIVEGDSIRSVNEGEAFSAEMADKNAGYKIGNAKFSHPKGYAVVANNPLYTGPVQQDMLGLKETLEKRYFGESADGNDNICIQVIHNILDIEKILAEYITNAAYAVNNISGLDKDIIGFGKFSTVYTYDEFKDPEHHRAAFNNNDKLINAIKAQYDEFDNFLDNPRLGYFGQAFFSKEGRNYIINYGNECYDILALLSGLAHWVVANNEEESRISRTWLYNLDKNLDNEYISTLNYLYDRITNELTNSFSKNSAANVNYIAETLGINPAEFAEQYFRFSIMKEQKNLGFNITKLREVMLDRKDMSEIRKNHKVFDSIRTKVYTMMDFVIYRYYIEEDAKVAAANKSLPDNEKSLSEKDIFVINLRGSFNDDQKDALYYDEANRIWRKLENIMHNIKEFRGNKTREYKKKDAPRLPRILPAGRDVSAFSKLMYALTMFLDGKEINDLLTTLINKFDNIQSFLKVMPLIGVNAKFVEEYAFFKDSAKIADELRLIKSFARMGEPIADARRAMYIDAIRILGTNLSYDELKALADTFSLDENGNKLKKGKHGMRNFIINNVISNKRFHYLIRYGDPAHLHEIAKNEAVVKFVLGRIADIQKKQGQNGKNQIDRYYETCIGKDKGKSVSEKVDALTKIITGMNYDQFDKKRSVIEDTGRENAEREKFKKIISLYLTVIYHILKNIVNINARYVIGFHCVERDAQLYKEKGYDINLKKLEEKGFSSVTKLCAGIDETAPDKRKDVEKEMAERAKESIDSLESANPKLYANYIKYSDEKKAEEFTRQINREKAKTALNAYLRNTKWNVIIREDLLRIDNKTCTLFANKAVALEVARYVHAYINDIAEVNSYFQLYHYIMQRIIMNERYEKSSGKVSEYFDAVNDEKKYNDRLLKLLCVPFGYCIPRFKNLSIEALFDRNEAAKFDKEKKKVSGNS

SEQ ID NO: 298 - protein, 966 aa, Artificial Sequence
  CasRx/Cas13d
IEKKKSFAKGMGVKSTLVSGSKVYMTTFAEGSDARLEKIVEGDSIRSVNEGEAFSAEMADKNAGYKIGNAKFSHPKGYAVVANNPLYTGPVQQDMLGLKETLEKRYFGESADGNDNICIQVIHNILDIEKILAEYITNAAYAVNNISGLDKDIIGFGKFSTVYTYDEFKDPEHHRAAFNNNDKLINAIKAQYDEFDNFLDNPRLGYFGQAFFSKEGRNYIINYGNECYDILALLSGLRHWVVHNNEEESRISRTWLYNLDKNLDNEYISTLNYLYDRITNELTNSFSKNSAANVNYIAETLGINPAEFAEQYFRFSIMKEQKNLGFNITKLREVMLDRKDMSEIRKNHKVFDSIRTKVYTMMDFVIYRYYIEEDAKVAAANKSLPDNEKSLSEKDIFVINLRGSFNDDQKDALYYDEANRIWRKLENIMHNIKEFRGNKTREYKKKDAPRLPRILPAGRDVSAFSKLMYALTMFLDGKEINDLLTTLINKFDNIQSFLKVMPLIGVNAKFVEEYAFFKDSAKIADELRLIKSFARMGEPIADARRAMYIDAIRILGTNLSYDELKALADTFSLDENGNKLKKGKHGMRNFIINNVISNKRFHYLIRYGDPAHLHEIAKNEAVVKFVLGRIADIQKKQGQNGKNQIDRYYETCIGKDKGKSVSEKVDALTKIITGMNYDQFDKKRSVIEDTGRENAEREKFKKIISLYLTVIYHILKNIVNINARYVIGFHCVERDAQLYKEKGYDINLKKLEEKGFSSVTKLCAGIDETAPDKRKDVEKEMAERAKESIDSLESANPKLYANYIKYSDEKKAEEFTRQINREKAKTALNAYLRNTKWNVIIREDLLRIDNKTCTLFRNKAVHLEVARYVHAYINDIAEVNSYFQLYHYIMQRIIMNERYEKSSGKVSEYFDAVNDEKKYNDRLLKLLCVPFGYCIPRFKNLSIEALFDRNEAAKFDKEKKKVSGNS

SEQ ID NO: 299 - protein, 877 aa, Artificial Sequence; identical to SEQ ID NO: 153
  Cas13d (contig tpg|DJXD01000002.1

SEQ ID NO: 300 - DNA, 36 bp, Artificial Sequence; identical to SEQ ID NO: 154
  Cas13d (contig tpg|DJXD01000002.1

SEQ ID NO: 301 - protein, 1027 aa, Artificial Sequence; identical to SEQ ID NO: 170
  contig emb|OBLI01020244

SEQ ID NO: 302 - DNA, 30 bp, Artificial Sequence
  CasRx Direct Repeat
aacccctaccaactggtcggggtttgaaac

SEQ ID NO: 303 - protein, 954 aa, Eubacterium siraeum; identical to SEQ ID NO: 1

SEQ ID NO: 304 - protein, 919 aa, Unknown; identical to SEQ ID NO: 3
  Ruminococcus sp., isolate 2789STDY5834971 CasM

SEQ ID NO: 305 - protein, 918 aa, Ruminococcus bicirculans; identical to SEQ ID NO: 104

SEQ ID NO: 306 - protein, 922 aa, Unknown; identical to SEQ ID NO: 107
  Ruminococcus sp., isolate 2789STDY5608892 CasM

SEQ ID NO: 307 - protein, 921 aa, Unknown
  Ruminococcus sp. CAG:57 CasM
MAKKNKMKPRELREAQKKARQLKAAEINNNAAPAIAAMPAAEVIAPVAEKKKSSVKAAGMKSILVSENKMYITSFGKGNSAVLEYEVDNNDYNKTQLSSKDNSNIELGDVNEVNITFSSKHGFGSGVEINTSNPTHRSGESSPVRGDMLGLKSELEKRFFGKTFDDNIHIQLIYNILDIEKILAVYVTNIVYALNNMLGIKDSESYDDFMGYLSARNTYEVFTHPDKSNLSDKVKGNIKKSLSKFNDLLKTKRLGYFGLEEPKTKDTRASEAYKKRVYHMLAIVGQIRQCVFHDKSGAKRFDLYSFINNIDPEYRDTLDYLVEERLKSINKDFIEGNKVNISLLIDMMKGYEADDIIRLYYDFIVLKSQKNLGFSIKKLREKMLEEYGFRFKDKQYDSVRSKMYKLMDFLLFCNYYRNDVAAGEALVRKLRFSMTDDEKEGIYADEAAKLWGKFRNDFENIADHMNGDVIKELGKADMDFDEKILDSEKKNASDLLYFSKMIYMLTYFLDGKEINDLLTTLISKFDNIKEFLKIMKSSAVDVECELTAGYKLFNDSQRITNELFIVKNIASMRKPAASAKLTMFRDALTILGIDDNITDDISEILKLKEKGKGIHGLRNFITNNVIESSRFVYLIKYANAQKIREVAKDEKVVMFVLGGIPDTQIERYYKSCVEFPDMNSSLEAKRSELARMIKNISFDDFKNVKQQAKGRENVAKERAKAVIGLYLTVMYLLVKNLVNVNARYVIAIHCLERDFGLYKEIIPELASKNLKNDYRILSQTLCELCDDRNESSNLFLKKNKRLRKCVEVDINNADSSMTRKYRNCIAHLTVVRELKEYIGDIRTVDSYFSIYHYVMQRCITKRGDDTKQEEKIKYEDDLLKNHGYTKDFVKALNSPFGYNIPRFKNLSIEQLFDRNEYLTEK

SEQ ID NO: 308 - protein, 933 aa, Ruminococcus flavefaciens; identical to SEQ ID NO: 62

SEQ ID NO: 309 - protein, 944 aa, Ruminococcus albus; identical to SEQ ID NO: 70

SEQ ID NO: 310 - protein, 967 aa, Ruminococcus flavefaciens; identical to SEQ ID NO: 92

SEQ ID NO: 311 - protein, 796 aa, Unknown
  Ruminococcus sp., isolate 2789STDY5834894 CasM
MEINTSNPTHRSGESSSVRGDMLGLKSELEKRFFGKTFDDNIHIQLIYNILDIEKILAVYVTNIVYALNNMLGVKGSESYDDFMGYLSAQNTYYIFTHPDKSNLSDKVKGNIKKSLSKFNDLLKTKRLGYFGLEEPKTKDKRVSEAYKKRVYHMLAIVGQIRQSVFHDKSNELDEYLYSFIDIIDSEYRDTLDYLVDERFDSINKGFVQGNKVNISLLIDMMKGYEADDIIRLYYDFIVLKSQKNLGFSIKKLREKMLDEYGFRFKDKQYDSVRSKMYKLMDFLLFCNYYRNDVVAGEALVRKLRFSMTDDEKEGIYADEAEKLWGKFRNDFENIADHMNGDVIKELGKADMDFDEKILDSEKKNASDLLYFSKMIYMLTYFLDGKEINDLLTTLISKFDNIKEFLKIMKSSAVDVECELTAGYKLFNDSQRITNELFIVKNIASMRKPAASAKLTMFRDALTILGIDDKITDDRISEILKLKEKGKGIHGLRNFITNNVIESSRFVYLIKYANAQKIREVAKNEKVVMFVLGGIPDTQIERYYKSCVEFPDMNSSLEAKCSELARMIKNISFDDFKNVKQQAKGRENVAKERAKAVIGLYLTVMYLLVKNLVNVNARYVIAIHCLERDFGLYKEIIPELASKNLKNDYRILSQTLCELCDDRDESPNLFLKKNKRLRKCVEVDINNADSSMTRKYRNCIAHLTVVRELKEYIGDIRTVDSYFSIYHYVMQRCITKREDDTKQEEKIKYEDDLLKNHGYTKDFVKALNSPFGYNIPRFKNLSIEQLFDRNEYLTEK

SEQ ID NO: 312 - protein, 412 aa, Artificial Sequence
  RtcB homolog
MIVLEIIGERNTAVVYGEIIDECAVSQIEEICNHPAFENSRIRIMPDCHAGKGCVIGFTCVTSNRMIVPNIVGVDIGCGILTTVFTADREIDYRALDTFIRSNIPSGMEIHDSVSDTVAENTALIAKVNGICDAIGESADVDYHLRSIGTLGGGNHFIEIDRLNNGNYALTVHTGSRNLGKRICGYFQSNASVIDTELRRSILLRHRSATTSEEHEEIDRRAAQIAPVSKELAFITGERYDSYIGCMLDAKALAAFNRTVISDRIMSFLADEYGVEIKDRFDTVHNYIDWYDDTHTSVVIRKGAISARKGERIVIPLNMRDGIIIAHGRGNEEWNCSAPHGSGRAYSRSDARRTFTLEEYVEEMDGVNTWSVSESTIDECPMAYKPSEMIIGSIGDTVEIESIAHTVYNFKA

SEQ ID NO: 313 - protein, 831 aa, Artificial Sequence
  WYL Eubacterium siraeum + C-term NLS
MKKTEKFDDVQSGYEYKYFLESIDKYRAAVQNIYTYGCFNQKQLSEQCNCSDQTIKKAFNFYNLCLANYIKKKKGTLSKKAKGRPTEAKYLEYDRFTLNENYLYNIYLWARITKKQMWAFSYFRRHTSLLINASRTEIKNQLSDFFLYFSEYMDRSKKAENSQDLGYIIDMTAPTEKNMLISSMCDALAVFGRKAPYSVPAYSISHKLKKLCGNDSKSLWSFMYDNYDRILYDEAVYTIRQAIRDRKLIGYQTVGTEKQKSVNYVVPLKIMYEYNLGRCYLLYSPLNSDSIIKSIRLDKLYKVAAYEPDSIINYEKLYDVLAVAENEIWLSGDYTKKDCLSRIVLKNVKPQAFSLIEKYGVCYTEDREAKTVTFNIRKADDIKPFIRTLGGDAVISEEDNPGLFREFAYDARIGRQMYYDDSFADCPAEKDSQPAKDSKTASGNDNIKKYASYPTLRLFNKYGSFMNILAEELAEHIFSEIIRMPVEKRAGQIEYSSNRLERVLNSYFKIYGFDELRTEASNITEWFTKATEELSDSDYSSWFSVNGGKFEAVADLNEYEHKQLLTNIEYEYLRLMLGDPDARAIIGNEYCEKLSEYVGSADTTLDEFFTVRYANRNEKTIENKHSVLRTIMRAMNNEKKADIEYKGKHYICSAYRFTYSLRERKHRLMVFDGNYIMQINLCDIKDAQMTKEPSLSDEEMNKLLTERKKYIEIAIPQNADAQQRNVFERALRLFGGFERYSWNDAKNGEYVIAVAYYEPDISVSSSADRRIYRRDTVAADIMSLGRYARVMKQPGFELDGVRYDSSLYDYISKNYSGTAARYEKPKKKRKV

SEQ ID NO: 314 - protein, 396 aa, Artificial Sequence
  WYL Ruminococcus sp.isolate 2789STDY5834971 + C-term  NLS
MLILPSTFLPKRDKNVPYIAEVQSIPLSPSAYSVIIKDKSIFETSLSPNGSVSMSSFLTSIFDSAYIASLKYKSEKYNGIPLLNAFVKWQIEEINDGLDDKSKEIIKSYLISKLSAKYEKTKTENAVRVRLSICRDLYDTLSSDDLYYENKVYSSTLRRFLKAVYEDYALLSDCERERLIFADNIIKINEVIKQNGSRYYSFIYAYSNMYSREKRRIRLIPYRIVSDEYKMYNYLVCLSDEKSAGKEFKADSYRISRLSGLSIAEKLSQKEYSSVTEYERLKEGHVKSVKHLLSDPRFGSDESDISKVYLTEKGVEMFGKILYQRPILKGNEKPKPNAVNEFISPPIQVKYYFNKFGKDGVILSPSDSFEEMRTLYVEGAEAYNREVEMPKKKRKV

SEQ ID NO: 315 - protein, 399 aa, Artificial Sequence
  WYL Ruminococcus bicirculans + C-term NLS
MSMTPSTFLPKREDGVPYIAEVQSIPLSPSAYSVIIKDKSIFETSLSPNGSVSMSSFLTSIFDSAYIASLKYKSDDNYKYIGIPLLNAFVKWQIEEIDDSLDDKSKEIIKSYLISKLSAKYEKTKTENAVRVRLSICRDLYDTLSSDDLYYENKVYSSTLRRFLKAVYEDYALLSDCERERLIFADNIIKINEVIKQNGSRYYSFIYAYSNMYSREKRRIRLIPYRIVSDEYKMYNYLVCLSDEKSAGKEFKADSYRISRLSGLSIAEKLSQKEYSSVTEYERLKEGHVKSVKHLLSDPRFGSDESDISKVYLTEKGVEMFGKILYQRPILKGNEKPKPNAVNEFISPPIQVKYYFNKFGKDGVILSPSDSFEEMRTLYVEGAEAYNREVEMPKKKRKV

SEQ ID NO: 316 - protein, 399 aa, Artificial Sequence
  WYL Ruminococcus sp. isolate 2789STDY5608892 + C-term NLS
MLIPPSTFLPKRDKNVPYIAEVQSIPLSPSAYSVIIKDKSIFETSLSPNGSVSMSSFLTSIFDSAYIASLKYKSDDNYKYIGIPLLNAFVEWQIEEIDDSLDDKSKEIIKSYLISKLSAKYEKTKTENAVRVRLSICRDLYDTLSSDDLYYENKVYSLTLRRFLKAVYEDYALLSDCERERLIFADNIIKINEVIKQNGSRYYSFIYAYSNMYSREKRRIRLIPYRIVSDEYKMYNYLVCLSDEKSAGKEFKADSYRISRLSGLSIAEKLSQKEYSSVTEYERLKEGHVKSVKHLLSDPRFGSDESDISKVYLTEKGVEMFGKILYQRPILKGNEKPKPNTVNEFISPPIQVKYYFNKFGKDGVILSPSDSFEEMRTLYVEGAEAYNREVEMPKKKRKV

SEQ ID NO: 317 - protein, 399 aa, Artificial Sequence; identical to SEQ ID NO: 316
  WYL Ruminococcus sp. CAG:57 + C-term NLS

SEQ ID NO: 318 - protein, 287 aa, Artificial Sequence
  WYL Ruminococcus flavefaciens FD-1 + C-term NLS
MIIAINQWKRRFSLVIYGKSEGETIVKIKLLLISLAYLISIYLLCSPGCIGIFTHGMLTTVIGVVTMLAATGTYGMYLYSSAIGERSLPEIPMNKETEYSRYKELENWFRAFRYLDRNNNFAMLSSDLATSYHDGLIRDNPFRNTELGDRLQTTSSDISIKYDQTLKILSESFEKNDITYQNYLSVLDNVLKLSSSHLKAIKKRVCVFDYRTWADNKNDEMCRKYIEEVKSSVIRLEEIEGKFDNLLHELICLSEISEDPLLEMQDLIETTSDYKSIEDQPKKKRKV

SEQ ID NO: 319 - protein, 233 aa, Artificial Sequence
  WYL Ruminococcus albus strain KH2T6 + C-term NLS
MCTWYYAEAKSLSFFIDKASQLPLSDIIMNTMSKSKAMSGNIRPTDMAAVLAPNKQGNVAVFPMIWGFTHESTSKPVINCRIESADTKPLWKDSWYRRRCVIPASWYYEWGVPPSEGELYHKNEYNKIQKEKYAIQPEGAEITYLAGLYRFEEHRGVQVPMFAVITRESVEPVSSIHDRMPLILGKDSLSEWIHPNGDPNKIAKTALTKMVMEKAIDYPEPEPSFMPKKKRKV

SEQ ID NO: 320 - protein, 321 aa, Artificial Sequence
  WYL Ruminococcus flavefaciens strain XPD3002 + C-term NLS
MELFNEYRNKSLRAFLKLAERISYGEELSIDEFEAEYYRLSGDNKKITSVFYKNTLYNDKLPIFDTREGKVRLFGEPDKCSNKHISDTLLKSEITWLHNALNDKLSKLFLSDEERISIDAKLSDYTEYYKNIDDMWRSNEDISEEVEKNFKIILKAINEKQALSYTFKNKNCEGFPVRIEYDERTCRIYMIIYDGNRFVKSDISKLSDIYITENSIDTIPEIKDDMLNKKAYLPVVFTVTDDKNRKAIDRALLAFSVYDHVVEPIDEKTARFTIQYYTMDLDLLIKDILAFGSDIKVESPRYVVKRITDILRKVPKKKRKV

SEQ ID NO: 321 - protein, 419 aa, Artificial Sequence
  RtcB Eubacterium siraeum + C-term NLS
MIVLEIIGERNTAVVYGEIIDECAVSQIEEICNHPAFENSRIRIMPDCHAGKGCVIGFTCVTSNRMIVPNIVGVDIGCGILTTVFTADREIDYRALDTFIRSNIPSGMEIHDSVSDTVAENTALIAKVNGICDAIGESADVDYHLRSIGTLGGGNHFIEIDRLNNGNYALTVHTGSRNLGKRICGYFQSNASVIDTELRRSILLRHRSATTSEEHEEIDRRAAQIAPVSKELAFITGERYDSYIGCMLDAKALAAFNRTVISDRIMSFLADEYGVEIKDRFDTVHNYIDWYDDTHTSVVIRKGAISARKGERIVIPLNMRDGIIIAHGRGNEEWNCSAPHGSGRAYSRSDARRTFTLEEYVEEMDGVNTWSVSESTIDECPMAYKPSEMIIGSIGDTVEIESIAHTVYNFKAPKKKRKV

SEQ ID NO: 322 - DNA, 30 bp, Artificial Sequence
  CasRx Direct Repeat
tacccctaccaactggtcggggtttgaaac

SEQ ID NO: 323-324 - skipped (2 entries)

SEQ ID NO: 325 - protein, 128 aa, Artificial Sequence
  RNAse1
KESRAKKFQRQHMDSDSSPSSSSTYCNQMMRRRNMTQGLCKPVNTFVHEPLVDVQNVCFQEKVTCKNGQGNCYKSNSSMHITDCRLTNGSRYPNCAYRTSPKERHIIVACEGSPYVPVHFDASVEDST

SEQ ID NO: 326 - protein, 119 aa, Artificial Sequence
  RNAse4
QDGMYQRFLRQHVHPEETGGSDRYCDLMMQRRKMTLYHCKRFNTFIHEDIWNIRSICSTTNIQCKNGKMNCHEGVVKVTDCRDTGSSRAPNCRYRAIASTRRVVIACEGNPQVPVHFDG

SEQ ID NO: 327 - protein, 127 aa, Artificial Sequence
  RNAse6
WPKRLTKAHWFEIQHIQPSPLQCNRAMSGINNYTQHCKHQNTFLHDSFQNVAAVCDLLSIVCKNRRHNCHQSSKPVNMTDCRLTSGKYPQCRYSAAAQYKFFIVACDPPQKSDPPYKLVPVHLDSIL

SEQ ID NO: 328 - protein, 155 aa, Artificial Sequence
  RNAse7
APARAGFCPLLLLLLLGLWVAEIPVSAKPKGMTSSQWFKIQHMQPSPQACNSAMKNINKHTKRCKDLNTFLHEPFSSVAATCQTPKIACKNGDKNCHQSHGPVSLTMCKLTSGKYPNCRYKEKRQNKSYVVACKPPQKKDSQQFHLVPVHLDRVL

SEQ ID NO: 329 - protein, 122 aa, Artificial Sequence
  RNAse8
TSSQWFKTQHVQPSPQACNSAMSIINKYTERCKDLNTFLHEPFSSVAITCQTPNIACKNSCKNCHQSHGPMSLTMGELTSGKYPNCRYKEKHLNTPYIVACDPPQQGDPGYPLVPVHLDKVV

SEQ ID NO: 330 - protein, 134 aa, Artificial Sequence
  RNAse2
KPPQFTWAQWFETQHINMTSQQCTNAMQVINNYQRRCKNQNTFLLTTFANVVNVCGNPNMTCPSNKTRKNCHHSGSQVPLIHCNLTTPSPQNISNCRYAQTPANMFYIVACDNRDQRRDPPQYPVVPVHLDRII

SEQ ID NO: 331 - protein, 216 aa, Artificial Sequence
  RNAse6PL
DKRLRDNHEWKKLIMVQHWPETVCEKIQNDCRDPPDYWTIHGLWPDKSEGCNRSWPFNLEEIKKNWMEITDSSLPSPSMGPAPPRWMRSTPRRSTLAEAWNSTGSWTSTGGCALPPAALPSGDLCCRPSLTAGSRGVGVDLTALHQLLHVHYSATGIIPEECSEPTKPFQIILHHDHTEWVQSIGMPIWGTISSSESAIGKNEESQPACAVLSHDS

SEQ ID NO: 332 - protein, 722 aa, Artificial Sequence
  RNAseL
AAVEDNHLLIKAVQNEDVDLVQQLLEGGANVNFQEEEGGWTPLHNAVQMSREDIVELLLRHGADPVLRKKNGATPFILAAIAGSVKDLLKLFLSKGADVNECDFYGFTAFMEAAVYGKVKALKFLYKRGANVNLRRKTKEDQERLRKGGATALMDAAEKGHVEVLKILLDEMGADVNACDNMGRNALIHALLSSDDSDVEAITHLLLDHGADVNVRGERGKTPLILAVEKKHLGLVQRLLEQEHIEINDTDSDGKTALLLAVELKLKKIAELLCKRGASTDCGDLVMTARRNYDHSLVKVLLSHGAKEDFHPPAEDWKPQSSHWGAALKDLHRIYRPMIGKLKFFIDEKYKIADTSEGGIYLGFYEKQEVAVKTFCEGSPRAQREVSCLQSSRENSHLVTFYGSESHRGHLFVCVTLCEQTLEACLDVHRGEDVENEEDEFARNVLSSIFKAVQELHLSCGYTHQDLQPQNILIDSKKAAHLADFDKSIKWAGDPQEVKRDLEDLGRLVLYVVKKGSISFEDLKAQSNEEVVQLSPDEETKDLIHRLFHPGEHVRDCLSDLLGHPFFWTWESRYRTLRNVGNESDIKTRKSESEILRLLQPGPSEHSKSFDKWTTKINECVMKKMNKFYEKRGNFYQNTVGDLLKFIRNLGEHIDEEKHKKMKLKIGDPSLYFQKTFPDLVIYVYTKLQNTEYRKHFPQTHSPNKPQCDGAGGASGLASPGC

SEQ ID NO: 333 - protein, 217 aa, Artificial Sequence
  RNAseT2
VQHWPETVCEKIQNDCRDPPDYWTIHGLWPDKSEGCNRSWPFNLEEIKDLLPEMRAYWPDVIHSFPNRSRFWKHEWEKHGTCAAQVDALNSQKKYFGRSLELYRELDLNSVLLKLGIKPSINYYQVADFKDALARVYGVIPKIQCLPPSQDEEVQTIGQIELCLTKQDQQLQNCTEPGEQPSPKQEVWLANGAAESRGLRVCEDGPVFYPPPKKTKH

SEQ ID NO: 334 - protein, 183 aa, Artificial Sequence
  RNAse11
EASESTMKIIKEEFTDEEMQYDMAKSGQEKQTIEILMNPILLVKNTSLSMSKDDMSSTLLTFRSLHYNDPKGNSSGNDKECCNDMTVWRKVSEANGSCKWSNNFIRSSTEVMRRVHRAPSCKFVQNPGISCCESLELENTVCQFTTGKQFPRCQYHSVTSLEKILTVLTGHSLMSWLVCGSKL

SEQ ID NO: 335 - protein, 185 aa, Artificial Sequence
  RNAseT2-like
  SITE (1)..(1): Xaa is any amino acid
XLGGADKRLRDNHEWKKLIMVQHWPETVCEKIQNDCRDPPDYWTIHGLWPDKSEGCNRSWPFNLEEIKDLLPEMRAYWPDVIHSFPNRSRFWKHEWEKHGTCAAQVDALNSQKKYFGRSLELYRELDLNSVLLKLGIKPSINYYQTTEEDLNLDVEPTTEDTAEEVTIHVLLHSALFGEIGPRRW

SEQ ID NO: 336 - protein, 128 aa, Artificial Sequence
  RNase1(K41R)
KESRAKKFQRQHMDSDSSPSSSSTYCNQMMRRRNMTQGRCRPVNTFVHEPLVDVQNVCFQEKVTCKNGQGNCYKSNSSMHITDCRLTNGSRYPNCAYRTSPKERHIIVACEGSPYVPVHFDASVEDST

SEQ ID NO: 337 - protein, 128 aa, Artificial Sequence
  RNase1 (RNase1(K41R, D121E))
KESRAKKFQRQHMDSDSSPSSSSTYCNQMMRRRNMTQGRCRPVNTFVHEPLVDVQNVCFQEKVTCKNGQGNCYKSNSSMHITDCRLTNGSRYPNCAYRTSPKERHIIVACEGSPYVPVHFEASVEDST

SEQ ID NO: 338 - protein, 128 aa, Artificial Sequence
  RNase1 (RNase1(K41R, D121E, H119N))
KESRAKKFQRQHMDSDSSPSSSSTYCNQMMRRRNMTQGRCRPVNTFVHEPLVDVQNVCFQEKVTCKNGQGNCYKSNSSMHITDCRLTNGSRYPNCAYRTSPKERHIIVACEGSPYVPVNFEASVEDST

SEQ ID NO: 339 - protein, 128 aa, Artificial Sequence
  (RNase1(H119N))
KESRAKKFQRQHMDSDSSPSSSSTYCNQMMRRRNMTQGRCKPVNTFVHEPLVDVQNVCFQEKVTCKNGQGNCYKSNSSMHITDCRLTNGSRYPNCAYRTSPKERHIIVACEGSPYVPVNFDASVEDST

SEQ ID NO: 340 - protein, 128 aa, Artificial Sequence
  (RNase1(R39D, N67D, N88A, G89D, R91D, H119N))
KESRAKKFQRQHMDSDSSPSSSSTYCNQMMRRRNMTQGDCKPVNTFVHEPLVDVQNVCFQEKVTCKDGQGNCYKSNSSMHITDCRLTADSDYPNCAYRTSPKERHIIVACEGSPYVPVNFDASVEDST

SEQ ID NO: 341 - protein, 128 aa, Artificial Sequence
  RNase1 (RNase1(R39D, N67D, N88A, G89D, R91D, H119N, K41R, D121E))
KESRAKKFQRQHMDSDSSPSSSSTYCNQMMRRRNMTQGDCRPVNTFVHEPLVDVQNVCFQEKVTCKDGQGNCYKSNSSMHITDCRLTADSDYPNCAYRTSPKERHIIVACEGSPYVPVNFEASVEDST

SEQ ID NO: 342 - protein, 128 aa, Artificial Sequence
  RNase1 (RNase1(R39D, N67D, N88A, G89D, R91D))
KESRAKKFQRQHMDSDSSPSSSSTYCNQMMRRRNMTQGDCKPVNTFVHEPLVDVQNVCFQEKVTCKDGQGNCYKSNSSMHITDCRLTADSDYPNCAYRTSPKERHIIVACEGSPYVPVHFDASVEDST

SEQ ID NO: 343 - protein, 128 aa, Artificial Sequence; identical to SEQ ID NO: 341
  Rnase1 (R39D, N67D, N88A, G89D, R91D, H119N, K41R, D121E)

SEQ ID NO: 344 - protein, 299 aa, Artificial Sequence
  NOB1
APVEHVVADAGAFLRHAALQDIGKNIYTIREVVTEIRDKATRRRLAVLPYELRFKEPLPEYVRLVTEFSKKTGDYPSLSATDIQVLALTYQLEAEFVGVSHLKQEPQKVKVSSSIQHPETPLHISGFHLPYKPKPPQETEKGHSACEPENLEFSSFMFWRNPLPNIDHELQELLIDRGEDVPSEEEEEEENGFEDRKDDSDDDGGGWITPSNIKQIQQELEQCDVPEDVRVGCLTTDFAMQNVLLQMGLHVLAVNGMLIREARSYILRCHGCFKTTSDMSRVFCSHCGNKTLKKVSVTV

SEQ ID NO: 345 - protein, 210 aa, Artificial Sequence
  ENDOV
AFSGLQRVGGVDVSFVKGDSVRACASLVVLSFPELEVVYEESRMVSLTAPYVSGFLAFREVPFLLELVQQLREKEPGLMPQVLLVDGNGVLHHRGFGVACHLGVLTDLPCVGVAKKLLQVDGLENNALHKEKIRLLQTRGDSFPLLGDSGTVLGMALRSHDRSTRPLYISVGHRMSLEAAVRLTCCCCRFRIPEPVRQADICSREHIRKS

SEQ ID NO: 346 - protein, 249 aa, Artificial Sequence
  ENDOG
AELPPVPGGPRGPGELAKYGLPGLAQLKSRESYVLCYDPRTRGALWVVEQLRPERLRGDGDRRECDFREDDSVHAYHRATNADYRGSGFDRGHLAAAANHRWSQKAMDDTFYLSNVAPQVPHLNQNAWNNLEKYSRSLTRSYQNVYVCTGPLFLPRTEADGKSYVKYQVIGKNHVAVPTHFFKVLILEAAGGQIELRTYVMPNAPVDEAIPLERFLVPIESIERASGLLFVPNILARAGSLKAITAGSK

SEQ ID NO: 347 - protein, 479 aa, Artificial Sequence
  ENDOD1
RLVGEEEAGFGECDKFFYAGTPPAGLAADSHVKICQRAEGAERFATLYSTRDRIPVYSAFRAPRPAPGGAEQRWLVEPQIDDPNSNLEEAINEAEAITSVNSLGSKQALNTDYLDSDYQRGQLYPFSLSSDVQVATFTLTNSAPMTQSFQERWYVNLHSLMDRALTPQCGSGEDLYILTGTVPSDYRVKDKVAVPEFVWLAACCAVPGGGWAMGFVKHTRDSDIIEDVMVKDLQKLLPFNPQLFQNNCGETEQDTEKMKKILEVVNQIQDEERMVQSQKSSSPLSSTRSKRSTLLPPEASEGSSSFLGKLMGFIATPFIKLFQLIYYLVVAILKNIVYFLWCVTKQVINGIESCLYRLGSATISYFMAIGEELVSIPWKVLKVVAKVIRALLRILCCLLKAICRVLSIPVRVLVDVATFPVYTMGAIPIVCKDIALGLGGTVSLLFDTAFGTLGGLFQVVFSVCKRIGYKVTFDNSGEL

SEQ ID NO: 348 - protein, 380 aa, Artificial Sequence
  hFEN1
MGIQGLAKLIADVAPSAIRENDIKSYFGRKVAIDASMSIYQFLIAVRQGGDVLQNEEGETTSHLMGMFYRTIRMMENGIKPVYVFDGKPPQLKSGELAKRSERRAEAEKQLQQAQAAGAEQEVEKFTKRLVKVTKQHNDECKHLLSLMGIPYLDAPSEAEASCAALVKAGKVYAAATEDMDCLTFGSPVLMRHLTASEAKKLPIQEFHLSRILQELGLNQEQFVDLCILLGSDYCESIRGIGPKRAVDLIQKHKSIEEIVRRLDPNKYPVPENWLHKEAHQLFLEPEVLDPESVELKWSEPNEEELIKFMCGEKQFSEERIRSGVKRLSKSRQGSTQGRLDDFFKVTGSLSSAKRKEPEPKGSTKKKAKTGAAGKFKRGK

SEQ ID NO: 349 - protein, 372 aa, Homo sapiens
MESGQPARRIAMAPLLEYERQLVLELLDTDGLVVCARGLGADRLLYHFLQLHCHPACLVLVLNTQPAEEEYFINQLKIEGVEHLPRRVTNEITSNSRYEVYTQGGVIFATSRILVVDFLTDRIPSDLITGILVYRAHRIIESCQEAFILRLFRQKNKRGFIKAFTDNAVAFDTGFCHVERVMRNLFVRKLYLWPRFHVAVNSFLEQHKPEVVEIHVSMTPTMLAIQTAILDILNACLKELKCHNPSLEVEDLSLENAIGKPFDKTIRHYLDPLWHQLGAKTKSLVQDLKILRTLLQYLSQYDCVTFLNLLESLRATEKAFGQNSGWLFLDSSTSMFINARARVYHLPDAKMSKKEKISEKMEIKEGEGILWG

SEQ ID NO: 350 - protein, 311 aa, Homo sapiens
CSPQESGMTALSARMLTRSRSLGPGAGPRGCREEPGPLRRREAAAEARKSHSPVKRPRKAQRLRVAYEGSDSEKGEGAEPLKVPVWEPQDWQQQLVNIRAMRNKKDAPVDHLGTEHCYDSSAPPKVRRYQVLLSLMLSSQTKDQVTAGAMQRLRARGLTVDSILQTDDATLGKLIYPVGFWRSKVKYIKQTSAILQQHYGGDIPASVAELVALPGVGPKMAHLAMAVAWGTVSGIAVDTHVHRIANRLRWTKKATKSPEETRAALEEWLPRELWHEINGLLVGFGQQTCLPVHPRCHACLNQALCPAAQGL

SEQ ID NO: 351 - protein, 186 aa, Homo sapiens
ESTHVEFKRFTTKKVIPRIKEMLPHYVSAFANTQGGYVLIGVDDKSKEVVGCKWEKVNPDLLKKEIENCIEKLPTFHFCCEKPKVNFTTKILNVYQKDVLDGYVCVIQVEPFCCVVFAEAPDSWIMKDNSVTRLTAEQWVVMMLDTQSAPPSLVTDYNSCLISSASSARKSPGYPIKVHKFKEALQ

SEQ ID NO: 352 - protein, 262 aa, Homo sapiens
TLQGTNTYLVGTGPRRILIDTGEPAIPEYISCLKQALTEFNTAIQEIVVTHWHRDHSGGIGDICKSINNDTTYCIKKLPRNPQREEIIGNGEQQYVYLKDGDVIKTEGATLRVLYTPGHTDDHMALLLEEENAIFSGDCILGEGTTVFEDLYDYMNSLKELLKIKADIIYPGHGPVIHNAEAKIQQYISHRNIREQQILTLFRENFEKSFTVMELVKIIYKNTPENLHEMAKHNLLLHLKKLEKEGKIFSNTDPDKKWKAHL

SEQ ID NO: 353 - protein, 518 aa, Homo sapiens
MLRVVSWNINGIRRPLQGVANQEPSNCAAVAVGRILDELDADIVCLQETKVTRDALTEPLAIVEGYNSYFSFSRNRSGYSGVATFCKDNATPVAAEEGLSGLFATQNGDVGCYGNMDEFTQEELRALDSEGRALLTQHKIRTWEGKEKTLTLINVYCPHADPGRPERLVFKMRFYRLLQIRAEALLAAGSHVIILGDLNTAHRPIDHWDAVNLECFEEDPGRKWMDSLLSNLGCQSASHVGPFIDSYRCFQPKQEGAFTCWSAVTGARHLNYGSRLDYVLGDRTLVIDTFQASFLLPEVMGSDHCPVGAVLSVSSVPAKQCPPLCTRFLPEFAGTQLKILRFLVPLEQSPVLEQSTLQHNNQTRVQTCQNKAQVRSTRPQPSQVGSSRGQKNLKSYFQPSPSCPQASPDIELPSLPLMSALMTPKTPEEKAVAKVVKGQAKTSEAKDEKELRTSFWKSVLAGPLRTPLCGGHREPCVMRTVKKPGPNLGRRFYMCARPRGPPTDPSSRCNFFLWSRPS

SEQ ID NO: 354 - protein, 350 aa, Homo sapiens
MLRVVSWNINGIRRPLQGVANQEPSNCAAVAVGRILDELDADIVCLQETKVTRDALTEPLAIVEGYNSYFSFSRNRSGYSGVATFCKDNATPVAAEEGLSGLFATQNGDVGCYGNMDEFTQEELRALDSEGRALLTQHKIRTWEGKEKTLTLINVYCPHADPGRPERLVFKMRFYRLLQIRAEALLAAGSHVIILGDLNTAHRPIDHWDAVNLECFEEDPGRKWMDSLLSNLGCQSASHVGPFIDSYRCFQPKQEGAFTCWSAVTGARHLNYGSRLDYVLGDRTLVIDTFQASFLLPEVMGSDHCPVGAVLSVSSVPAKQCPPLCTRFLPEFAGTQLKILRFLVPLEQSP

SEQ ID NO: 355 - protein, 287 aa, Homo sapiens
PKRGKKGAVAEDGDELRTEPEAKKSKTAAKKNDKEAAGEGPALYEDPPDQKTSPSGKPATLKICSWNVDGLRAWIKKKGLDWVKEEAPDILCLQETKCSENKLPAELQELPGLSHQYWSAPSDKEGYSGVGLLSRQCPLKVSYGIGDEEHDQEGRVIVAEFDSFVLVTAYVPNAGRGLVRLEYRQRWDEAFRKFLKGLASRKPLVLCGDLNVAHEEIDLRNPKGNKKNAGFTPQERQGFGELLQAVPLADSFRHLYPNTPYAYTFWTYMMNARSKNVGWRLDYFLLS

SEQ ID NO: 356 - protein, 123 aa, Homo sapiens [sequence omitted]

SEQ ID NO: 357 - protein, 136 aa, Homo sapiens
SSLIRRVISTAKAPGAIGPYSQAVLVDRTIYISGQIGMDPSSGQLVSGGVAEEAKQALKNMGEILKAAGCDFTNVVKTTVLLADINDFNTVNEIYKQYFKSNFPARAAYQVAALPKGSRIEIEAVAIQGPLTTASL

SEQ ID NO: 358 - protein, 189 aa, Homo sapiens
GGGTPKAPNLEPPLPEEEKEGSDLRPVVIDGSNVAMSHGNKEVFSCRGILLAVNWFLERGHTDITVFVPSWRKEQPRPDVPITDQHILRELEKKKILVFTPSRRVGGKRVVCYDDRFIVKLAYESDGIVVSNDTYRDLQGERQEWKRFIEERLLMYSFVNDKFMPPDDPLGRHGPSLDNFLRKKPLTLE

SEQ ID NO: 359 - protein, 598 aa, Homo sapiens
SGPCGEKPVLEASPTMSLWEFEDSHSRQGTPRPGQELAAEEASALELQMKVDFFRKLGYSSTEIHSVLQKLGVQADTNTVLGELVKHGTATERERQTSPDPCPQLPLVPRGGGTPKAPNLEPPLPEEEKEGSDLRPVVIDGSNVAMSHGNKEVFSCRGILLAVNWFLERGHTDITVFVPSWRKEQPRPDVPITDQHILRELEKKKILVFTPSRRVGGKRVVCYDDRFIVKLAYESDGIVVSNDTYRDLQGERQEWKRFIEERLLMYSFVNDKFMPPDDPLGRHGPSLDNFLRKKPLTLEHRKQPCPYGRKCTYGIKCRFFHPERPSCPQRSVADELRANALLSPPRAPSKDKNGRRPSPSSQSSSLLTESEQCSLDGKKLGAQASPGSRQEGLTQTYAPSGRSLAPSGGSGSSFGPTDWLPQTLDSLPYVSQDCLDSGIGSLESQMSELWGVRGGGPGEPGPPRAPYTGYSPYGSELPATAAFSAFGRAMGAGHFSVPADYPPAPPAFPPREYWSEPYPLPPPTSVLQEPPVQSPGAGRSPWGRAGSLAKEQASVYTKLCGVFPPHLVEAVMGRFPQLLDPQQLAAEILSYKSQHPSE

SEQ ID NO: 360 - protein, 136 aa, Homo sapiens; identical to SEQ ID NO: 357

SEQ ID NO: 361 - protein, 213 aa, Homo sapiens
EALFFPSQVTCTEALLRAPGAELAELPEGCPCGLPHGESALSRLLRALLAARASLDLCLFAFSSPQLGRAVQLLHQRGVRVRVVTDCDYMALNGSQIGLLRKAGIQVRHDQDPGYMHHKFAIVDKRVLITGSLNWTTQAIQNNRENVLITEDDEYVRLFLEEFERIWEQFNPTKYTFFPPKKSHGSCAPPVSRAGGRLLSWHRTCGTSSESQT

SEQ ID NO: 362 - protein, 382 aa, Homo sapiens
KARYKTLEPRGYSLLIRGLIHSDRWREALLLLEDIKKVITPSKKNYNDCIQGALLHQDVNTAWNLYQELLGHDIVPMLETLKAFFDFGKDIKDDNYSNKLLDILSYLRNNQLYPGESFAHSIKTWFESVPGKQWKGQFTTVRKSGQCSGCGKTIESIQLSPEEYECLKGKIMRDVIDGGDQYRKTTPQELKRFENFIKSRPPFDVVIDGLNVAKMFPKVRESQLLLNVVSQLAKRNLRLLVLGRKHMLRRSSQWSRDEMEEVQKQASCFFADDISEDDPFLLYATLHSGNHCRFITRDLMRDHKACLPDAKTQRLFFKWQQGHQLAIVNRFPGSKLTFQRILSYDTVVQTTGDSWHIPYDEDLVERCSCEVPTKWLCLHQKT

SEQ ID NO: 363 - protein, 360 aa, Homo sapiens
SVEPMFRHLKNTYAGLQLVVVILPGKTPVYAEVKRVGDTVLGMATQCVQMKNVQRTTPQTLSNLCLKINVKLGGVNNILLPQGRPPVFQQPVIFLGADVTHPPAGDGKKPSIAAVVGSMDAHPNRYCATVRVQQHRQEIIQDLAAMVRELLIQFYKSTRFKPTRIIFYRDGVSEGQFQQVLHHELLAIREACIKLEKDYQPGITFIVVQKRHHTRLFCTDKNERVGKSGNIPAGTTVDTKITHPTEFDFYLCSHAGIQGTSRPSHYHVLWDDNRFSSDELQILTYQLCHTYVRCTRSVSIPAPAYYAHLVAFRARYHLVDKEHDSAEGSHTSGQSNGRDHQALAKAVQVHQDTLRTMYFA

SEQ ID NO: 364 - protein, 327 aa, Homo sapiens
QGAEGALTGKQPDGSAEKAVLEQFGFPLTGTEARCYTNHALSYDQAKRVPRWVLEHISKSKIMGDADRKHCKFKPDPNIPPTFSAFNEDYVGSGWSRGHMAPAGNNKFSSKAMAETFYLSNIVPQDFDNNSGYWNRIEMYCRELTERFEDVWVVSGPLTLPQTRGDGKKIVSYQVIGEDNVAVPSHLYKVILARRSSVSTEPLALGAFVVPNEAIGFQPQLTEFQVSLQDLEKLSGLVFFPHLDRTSDIRNICSVDTCKLLDFQEFTLYLSTRKIEGARSVLRLEKIMENLKNAEIEPDDYFMSRYEKKLEELKAKEQSGTQIRKPS

SEQ ID NO: 365 - protein, 526 aa, Homo sapiens
EHPSKMEFFQKLGYDREDVLRVLGKLGEGALVNDVLQELIRTGSRPGALEHPAAPRLVPRGSCGVPDSAQRGPGTALEEDFRTLASSLRPIVIDGSNVAMSHGNKETFSCRGIKLAVDWFRDRGHTYIKVFVPSWRKDPPRADTPIREQHVLAELERQAVLVYTPSRKVHGKRLVCYDDRYIVKVAYEQDGVIVSNDNYRDLQSENPEWKWFIEQRLLMFSFVNDRFMPPDDPLGRHGPSLSNFLSRKPKPPEPSWQHCPYGKKCTYGIKCKFYHPERPHHAQLAVADELRAKTGARPGAGAEEQRPPRAPGGSAGARAAPREPFAHSLPPARGSPDLAALRGSFSRLAFSDDLGPLGPPLPVPACSLTPRLGGPDWVSAGGRVPGPLSLPSPESQFSPGDLPPPPGLQLQPRGEHRPRDLHGDLLSPRRPPDDPWARPPRSDRFPGRSVWAEPAWGDGATGGLSVYATEDDEGDARARARIALYSVFPRDQVDRVMAAFPELSDLARLILLVQRCQSAGAPLGKP

SEQ ID NO: 366 - protein, 475 aa, Homo sapiens
RQQQPQVVEKQQETPLAPADFAHISQDAQSLHSGASRRSQKRLQSPSKQAQPLDDPEAEQLTVVGKISFNPKDVLGRGAGGTFVFRGQFEGRAVAVKRLLRECFGLVRREVQLLQESDRHPNVLRYFCTERGPQFHYIALELCRASLQEYVENPDLDRGGLEPEVVLQQLMSGLAHLHSLHIVHRDLKPGNILITGPDSQGLGRVVLSDFGLCKKLPAGRCSFSLHSGIPGTEGWMAPELLQLLPPDSPTSAVDIFSAGCVFYYVLSGGSHPFGDSLYRQANILTGAPCLAHLEEEVHDKVVARDLVGAMLSPLPQPRPSAPQVLAHPFFWSRAKQLQFFQDVSDWLEKESEQEPLVRALEAGGCAVVRDNWHEHISMPLQTDLRKFRSYKGTSVRDLLRAVRNKKHHYRELPVEVRQALGQVPDGFVQYFTNRFPRLLLHTHRAMRSCASESLFLPYYPPDSEARRPCPGATGR

SEQ ID NO: 367 - protein, 384 aa, Homo sapiens
KLVRKNIEKDNAGQVTLVPEEPEDMWHTYNLVQVGDSLRASTIRKVQTESSTGSVGSNRVRTTLTLCVEAIDFDSQACQLRVKGTNIQENEYVKMGAYHTIELEPNRQFTLAKKQWDSVVLERIEQACDPAWSADVAAVVMQEGLAHICLVTPSMTLTRAKVEVNIPRKRKGNCSQHDRALERFYEQVVQAIQRHIHFDVVKCILVASPGFVREQFCDYLFQQAVKTDNKLLLENRSKFLQVHASSGHKYSLKEALCDPTVASRLSDTKAAGEVKALDDFYKMLQHEPDRAFYGLKQVEKANEAMAIDTLLISDELFRHQDVATRSRYVRLVDSVKENAGTVRIFSSLHVSGEQLSQLTGVAAILRFPVPELSDQEGDSSSEED

SEQ ID NO: 368 - protein, 166 aa, Homo sapiens
SLVIRNLQRVIPIRRAPLRSKIEIVRRILGVQKFDLGIICVDNKNIQHINRIYRDRNVPTDVLSFPFHEHLKAGEFPQPDFPDDYNLGDIFLGVEYIFHQCKENEDYNDVLTVTATHGLCHLLGFTHGTEAEWQQMFQKEKAVLDELGRRTGTRLQPLTRGLFGGS

SEQ ID NO: 369 - protein, 178 aa, Homo sapiens
QEVIAGLERFTFAFEKDVEMQKGTGLLPFQGMDKSASAVCNFFTKGLCEKGKLCPFRHDRGEKMVVCKHWLRGLCKKGDHCKFLHQYDLTRMPECYFYSKFGDCSNKECSFLHVKPAFKSQDCPWYDQGFCKDGPLCKYRHVPRIMCLNYLVGFCPEGPKCQFAQKIREFKLLPGSKI

SEQ ID NO: 370 - protein, 384 aa, Homo sapiens
KLVRKNIEKDNAGQVTLVPEEPEDMWHTYNLVQVGDSLRASTIRKVQTESSTGSVGSNRVRTTLTLCVEAIDFDSQACQLRVKGTNIQENEYVKMGAYHTIELEPNRQFTLAKKQWDSVVLERIEQACDPAWSADVAAVVMQEGLAHICLVTPSMTLTRAKVEVNIPRKRKGNCSQHDRALERFYEQVVQAIQRHIHFDVVKCILVASPGFVREQFCDYMFQQAVKTDNKLLLENRSKFLQVHASSGHKYSLKEALCDPTVASRLSDTKAAGEVKALDDFYKMLQHEPDRAFYGLKQVEKANEAMAIDTLLISDELFRHQDVATRSRYVRLVDSVKENAGTVRIFSSLHVSGEQLSQLTGVAAILRFPVPELSDQEGDSSSEED

SEQ ID NO: 371 - protein, 256 aa, Homo sapiens
DPAWSADVAAVVMQEGLAHICLVTPSMTLTRAKVEVNIPRKRKGNCSQHDRALERFYEQVVQAIQRHIHFDVVKCILVASPGFVREQFCDYMFQQAVKTDNKLLLENRSKFLQVHASSGHKYSLKEALCDPTVASRLSDTKAAGEVKALDDFYKMLQHEPDRAFYGLKQVEKANEAMAIDTLLISDELFRHQDVATRSRYVRLVDSVKENAGTVRIFSSLHVSGEQLSQLTGVAAILRFPVPELSDQEGDSSSEED

SEQ ID NO: 372 - protein, 209 aa, Homo sapiens
MDPGKDKEGVPQPSGPPARKKFVIPLDEDEVPPGVRGNPVLKFVRNVPWEFGDVIPDYVLGQSTCALFLSLRYHNLHPDYIHGRLQSLGKNFALRVLLVQVDVKDPQQALKELAKMCILADCTLILAWSPEEAGRYLETYKAYEQKPADLLMEKLEQDFVSRVTECLTTVKSVNKTDSQTLLTTFGSLEQLIAASREDLALCPGLGPQK

SEQ ID NO: 373 - protein, 128 aa, Homo sapiens
KESRAKKFQRQHMDSDSSPSSSSTYCNQMMRRRNMTQGRCKPVNTFVHEPLVDVQNVCFQEKVTCKNGQGNCYKSNSSMHITDCRLTNGSRYPNCAYRTSPKERHIIVACEGSPYVPVHFDASVEDST

SEQ ID NO: 374 - protein, 123 aa, Homo sapiens [sequence omitted]

SEQ ID NO: 375 - protein, 129 aa, Homo sapiens
GLGLVQPSYGQDGMYQRFLRQHVHPEETGGSDRYCNLMMQRRKMTLYHCKRFNTFIHEDIWNIRSICSTTNIQCKNGKMNCHEGVVKVTDCRDTGSSRAPNCRYRAIASTRRVVIACEGNPQVPVHFDG

SEQ ID NO: 376 - protein, 375 aa, Homo sapiens
  SITE (1)..(1): Xaa is any amino acid
XSAVDNILLKLAKFKIGFLRLGQIQKVHPAIQQFTEQEICRSKSIKSLALLEELYNSQLIVATTCMGINHPIFSRKIFDFCIVDEASQISQPICLGPLFFSRRFVLVGDHQQLPPLVLNREARALGMSESLFKRLEQNKSAVVQLTVQYRMNSKIMSLSNKLTYEGKLECGSDKVANAVINLRHFKDVKLELEFYADYSDNPWLMGVFEPNNPVCFLNTDKVPAPEQVEKGGVSNVTEAKLIVFLTSIFVKAGCSPSDIGIIAPYRQQLKIINDLLARSIGMVEVNTVDKYQGRDKSIVLVSFVRSNKDGTVGELLKDWRRLNVAITRAKHKLILLGCVPSLNCYPPLEKLLNHLNSEKLISFFFCIWSHLIALL

SEQ ID NO: 377 - protein, 88 aa, Homo sapiens
MALRSHDRSTRPLYISVGHRMSLEAAVRLTCCCCRFRIPEPVRQADICSREHIRKSLGLPGPPTPRSPKAQRPVACPKGDSGESSALC

SEQ ID NO: 378 - protein, 212 aa, Homo sapiens
CYTNHALSYDQAKRVPRWVLEHISKSKIMGDADRKHCKFKPDPNIPPTFSAFNEDYVGSGWSRGHMAPAGNNKFSSKAMAETFYLSNIVPQDFDNNSGYWNRIEMYCRELTERFEDVWVVSGPLTLPQTRGDGKKIVSYQVIGEDNVAVPSHLYKVILARRSSVSTEPLALGAFVVPNEAIGFQPQLTEFQVSLQDLEKLSGLVFFPHLDRT

SEQ ID NO: 379 - protein, 123 aa, Homo sapiens
VTVSQMTSVLNGKTRRFADIQLQHGALCFNIRYGTTVEEEKNHVLEIARQRAVAQAWTKEQRRLQEGEEGIRAWTEGEKQQLLSTGRVQGYDGYFVLSVEQYLELSDSANNIHFMRQSEIGRR

SEQ ID NO: 380 - protein, 125 aa, Homo sapiens
TVSQPTLLVNGKTRRFTNIEFQYSTLLLSIRYGLTPDTLDEEKARVLDQARQRALGTAWAKEQQKARDGREGSRLWTEGEKQQLLSTGRVQGYEGYYVLPVEQYPELADSSSNIQFLRQNEMGKR

SEQ ID NO: 381 - protein, 137 aa, Artificial Sequence
  RNAseK
MGWLRPGPRPLCPPARASWAFSHRFPSPLAPRRSPTPFFMASLLCCGPKLAACGIVLSAWGVIMLIMLGIFFNVHSAVLIEDVPFTEKDFENGPQNIYNLYEQVSYNCFIAAGLYLLLGGFSFCQVRLNKRKEYMVR

SEQ ID NO: 382 - protein, 1245 aa, Artificial Sequence
  TALEN
MRIGKSSGWLNESVSLEYEHVSPPTRPRDTRRRPRAAGDGGLAHLHRRLAVGYAEDTPRTEARSPAPRRPLPVAPASAPPAPSLVPEPPMPVSLPAVSSPRFSAGSSAAITDPFPSLPPTPVLYAMARELEALSDATWQPAVPLPAEPPTDARRGNTVFDEASASSPVIASACPQAFASPPRAPRSARARRARTGGDAWPAPTFLSRPSSSRIGRDVFGKLVALGYSREQIRKLKQESLSEIAKYHTTLTGQGFTHADICRISRRRQSLRVVARNYPELAAALPELTRAHIVDIARQRSGDLALQALLPVATALTAAPLRLSASQIATVAQYGERPAIQALYRLRRKLTRAPLHLTPQQVVAIASNTGGKRALEAVCVQLPVLRAAPYRLSTEQVVAIASNKGGKQALEAVKAHLLDLLGAPYVLDTEQVVAIASHNGGKQALEAVKADLLDLRGAPYALSTEQVVAIASHNGGKQALEAVKADLLELRGAPYALSTEQVVAIASHNGGKQALEAVKAHLLDLRGVPYALSTEQVVAIASHNGGKQALEAVKAQLLDLRGAPYALSTAQVVAIASNGGGKQALEGIGEQLLKLRTAPYGLSTEQVVAIASHDGGKQALEAVGAQLVALRAAPYALSTEQVVAIASNKGGKQALEAVKAQLLELRGAPYALSTAQVVAIASHDGGNQALEAVGTQLVALRAAPYALSTEQVVAIASHDGGKQALEAVGAQLVALRAAPYALNTEQVVAIASSHGGKQALEAVRALFPDLRAAPYALSTAQLVAIASNPGGKQALEAVRALFRELRAAPYALSTEQVVAIASNHGGKQALEAVRALFRGLRAAPYGLSTAQVVAIASSNGGKQALEAVWALLPVLRATPYDLNTAQIVAIASHDGGKPALEAVWAKLPVLRGAPYALSTAQVVAIACISGQQALEAIEAHMPTLRQASHSLSPERVAAIACIGGRSAVEAVRQGLPVKAIRRIRREKAPVAGPPPASLGPTPQELVAVLHFFRAHQQPRQAFVDALAAFQATRPALLRLLSSVGVTEIEALGGTIPDATERWQRLLGRLGFRPATGAAAPSPDSLQGFAQSLERTLGSPGMAGQSACSPHRKRPAETAIAPRSIRRSPNNAGQPSEPWPDQLAWLQRRKRTARSHIRADSAASVPANLHLGTRAQFTPDRLRAEPGPIMQAHTSPASVSFGSHVAFEPGLPDPGTPTSADLASFEAEPFGVGPLDFHLDWLLQILET

SEQ ID NO: 383 - protein, 1373 aa, Artificial Sequence
  TALEN
MDPIRSRTPSPARELLPGPQPDRVQPTADRGGAPPAGGPLDGLPARRTMSRTRLPSPPAPSPAFSAGSFSDLLRQFDPSLLDTSLLDSMPAVGTPHTAAAPAECDEVQSGLRAADDPPPTVRVAVTAARPPRAKPAPRRRAAQPSDASPAAQVDLRTLGYSQQQQEKIKPKVGSTVAQHHEALVGHGFTHAHIVALSRHPAALGTVAVKYQDMIAALPEATHEDIVGVGKQWSGARALEALLTVAGELRGPPLQLDTGQLVKIAKRGGVTAVEAVHASRNALTGAPLNLTPAQVVAIASNNGGKQALETVQRLLPVLCQAHGLTPAQVVAIASHDGGKQALETMQRLLPVLCQAHGLPPDQVVAIASNIGGKQALETVQRLLPVLCQAHGLTPDQVVAIASHGGGKQALETVQRLLPVLCQAHGLTPDQVVAIASHDGGKQALETVQRLLPVLCQAHGLTPDQVVAIASNGGGKQALETVQRLLPVLCQAHGLTPDQVVAIASNGGKQALETVQRLLPVLCQAHGLTPDQVVAIASHDGGKQALETVQRLLPVLCQTHGLTPAQVVAIASHDGGKQALETVQQLLPVLCQAHGLTPDQVVAIASNIGGKQALATVQRLLPVLCQAHGLTPDQVVAIASNGGGKQALETVQRLLPVLCQAHGLTPDQVVAIASNGGGKQALETVQRLLPVLCQAHGLTQVQVVAIASNIGGKQALETVQRLLPVLCQAHGLTPAQVVAIASHDGGKQALETVQRLLPVLCQAHGLTPDQVVAIASNGGGKQALETVQRLLPVLCQAHGLTQEQVVAIASNNGGKQALETVQRLLPVLCQAHGLTPDQVVAIASNGGGKQALETVQRLLPVLCQAHGLTPAQVVAIASNIGGKQALETVQRLLPVLCQDHGLTLAQVVAIASNIGGKQALETVQRLLPVLCQAHGLTQDQVVAIASNIGGKQALETVQRLLPVLCQDHGLTPDQVVAIASNIGGKQALETVQRLLPVLCQDHGLTLDQVVAIASNGGKQALETVQRLLPVLCQDHGLTPDQVVAIASNSGGKQALETVQRLLPVLCQDHGLTPNQVVAIASNGGKQALESIVAQLSRPDPALAALTNDHLVALACLGGRPAMDAVKKGLPHAPELIRRVNRRIGERTSHRVADYAQVVRVLEFFQCHSHPAYAFDEAMTQFGMSRNGLVQLFRRVGVTELEARGGTLPPASQRWDRILQASGMKRAKPSPTSAQTPDQASLHAFADSLERDLDAPSPMHEGDQTGASSRKRSRSDRAVTGPSAQHSFEVRVPEQRDALHLPLSWRVKRPRTRIGGGLPDPGTPIAADLAASSTVMWEQDAAPFAGAADDFPAFNEEELAWLMELLPQSGSVGGTI

SEQ ID NO: 384 - protein, 1978 aa, Artificial Sequence
  ZNF638
MSRPRFNPRGDFPLQRPRAPNPSGMRPPGPFMRPGSMGLPRFYPAGRARGIPHRFAGHESYQNMGPQRMNVQVTQHRTDPRLTKEKLDFHEAQQKKGKPHGSRWDDEPHISASVAVKQSSVTQVTEQSPKVQSRYTKESASSILASFGLSNEDLEELSRYPDEQLTPENMPLILRDIRMRKMGRRLPNLPSQSRNKETLGSEAVSSNVIDYGHASKYGYTEDPLEVRIYDPEIPTDEVENEFQSQQNISASVPNPNVICNSMFPVEDVFRQMDFPGESSNNRSFFSVESGTKMSGLHISGGQSVLEPIKSVNQSINQTVSQTMSQSLIPPSMNQQPFSSELISSVSQQERIPHEPVINSSNVHVGSRGSKKNYQSQADIPIRSPFGIVKASWLPKFSHADAQKMKRLPTPSMMNDYYAASPRIFPHLCSLCNVECSHLKDWIQHQNTSTHIESCRQLRQQYPDWNPEILPSRRNEGNRKENETPRRRSHSPSPRRSRRSSSSHRFRRSRSPMHYMYRPRSRSPRICHRFISRYRSRSRSRSPYRIRNPFRGSPKCFRSVSPERMSRRSVRSSDRKKALEDVVQRSGHGTEFNKQKHLEAADKGHSPAQKPKTSSGTKPSVKPTSATKSDSNLGGHSIRCKSKNLEDDTLSECKQVSDKAVSLQRKLRKEQSLHYGSVLLITELPEDGCTEEDVRKLFQPFGKVNDVLIVPYRKEAYLEMEFKEAITAIMKYIETTPLTIKGKSVKICVPGKKKAQNKEVKKKTLESKKVSASTLKRDADASKAVEIVTSTSAAKTGQAKASVAKVNKSTGKSASSVKSVVTVAVKGNKASIKTAKSGGKKSLEAKKTGNVKNKDSNKPVTIPENSEIKTSIEVKATENCAKEAISDAALEATENEPLNKETEEMCVMLVSNLPNKGYSVEEVYDLAKPFGGLKDILILSSHKKAYIEINRKAAESMVKFYTCFPVLMDGNQLSISMAPENMNIKDEEAIFITLVKENDPEANIDTIYDRFVHLDNLPEDGLQCVLCVGLQFGKVDHHVFISNRNKAILQLDSPESAQSMYSFLKQNPQNIGDHMLTCSLSPKIDLPEVQIEHDPELEKESPGLKNSPIDESEVQTATDSPSVKPNELEEESTPSIQTETLVQQEEPCEEEAEKATCDSDFAVETLELETQGEEVKEEIPLVASASVSIEQFTENAEECALNQQMFNSDLEKKGAEIINPKTALLPSDSVFAEERNLKGILEESPSEAEDFISGITQTMVEAVAEVEKNETVSEILPSTCIVTLVPGIPTGDEKTVDKKNISEKKGNMDEKEEKEFNTKETRMDLQIGTEKAEKNEGRMDAEKVEKMAAMKEKPAENTLFKAYPNKGVGQANKPDETSKTSILAVSDVSSSKPSIKAVIVSSPKAKATVSKTENQKSFPKSVPRDQINAEKKLSAKEFGLLKPTSARSGLAESSSKFKPTQSSLTRGGSGRISALQGKLSKLDYRDITKQSQETEARPSIMKRDDSNNKTLAEQNTKNPKSTTGRSSKSKEEPLFPFNLDEFVTVDEVIEEVNPSQAKQNPLKGKRKETLKNVPFSELNLKKKKGKTSTPRGVEGELSFVTLDEIGEEEDAAAHLAQALVTVDEVIDEEELNMEEMVKNSNSLFTLDELIDQDDCISHSEPKDVTVLSVAEEQDLLKQERLVTVDEIGEVEELPLNESADITFATLNTKGNEGDTVRDSIGFISSQVPEDPSTLVTVDEIQDDSSDLHLVTLDEVTEEDEDSLADFNNLKEELNFVTVDEVGEEEDGDNDLKVELAQSKNDHPTDKKGNRKKRAVDTKKTKLESLSQVGPVNENVMEEDLKTMIERHLTAKTPTKRVRIGKTLPSEKAVVTEPAKGEEAFQMSEVDEESGLKDSEPERKRKKTEDSSSGKSVASDVPEELDFLVPKAGFFCPICSLFYSGEKAMTNHCKSTRHKQNTEKFMAKQRKEKEQNEAEERSSR

SEQ ID NO: 385 - protein, 9 aa, Artificial Sequence
  Extra amino acids between NLS and R1'
GSIVAVSRG

SEQ ID NO: 386 - protein, 7 aa, Artificial Sequence
  Extra amino acids between R8' and Linker
GRRDRMA

SEQ ID NO: 387 - protein, 10 aa, Artificial Sequence
  Extra amino acids between NLS and R1'
GSIVAVSRGM

SEQ ID NO: 388 - protein, 8 aa, Artificial Sequence
  Extra amino acids between NLS and R1'
IVAVSRGM

SEQ ID NO: 389 - DNA, 938 bp, Artificial Sequence
  tCAG promoter
ccattgacgtcaataatgacgtatgttcccatagtaacgccaatagggactttccattgacgtcaatgggtggagtatttacggtaaactgcccacttggcagtacatcaagtgtatcatatgccaagtacgccccctattgacgtcaatgacggtaaatggcccgcctggcattatgcccagtacatgaccttatgggactttcctacttggcagtacatctacgtattagtcatcgctattaccatggtcgaggtgagccccacgttctgcttcactctccccatctcccccccctccccacccccaattttgtatttatttattttttaattattttgtgcagcgatgggggcggggggggggggggggcgcgcgccaggcggggcggggcggggcgaggggcggggcggggcgaggcggagaggtgcggcggcagccaatcagagcggcgcgctccgaaagtttccttttatggcgaggcggcggcggcggcggccctataaaaagcgaagcgcgcggcgggcgggagtcgctgcgacgctgccttcgccccgtgccccgctccgccgccgcctcgcgccgcccgccccggctctgactgaccgcgttactcccacaggtgagcgggcgggacggcccttctcctccgggctgtaattagcgcttggtttaatgacggcttgtttcttttctgtggctgcgtgaaagccttgaggggctccgggagggccctttgtgcggggggagcggctcggggctgtccgcggggggacggctgccttcgggggggacggggcagggcggggttcggcttctggcgtgtgaccggcggctctagagcctctgctaaccatgttcatgccttcttctttttcctacagctcctgggcaacgtgctggttattgtgctgtctcatcattttggcaaagaattg

SEQ ID NO: 390-393 - skipped (4 entries)

SEQ ID NO: 394 - DNA, 36 bp, Leptotrichia wadei
gatttagactaccccaaaaacgaaggggactaaaac

SEQ ID NO: 395 - DNA, 36 bp, Listeria seeligeri
gtaagagactacctctatatgaaagaggactaaaac

SEQ ID NO: 396 - DNA, 35 bp, Lachnospiraceae bacterium MA2020
gtattgagaaaagccagatatagttggcaatagac

SEQ ID NO: 397 - DNA, 35 bp, Lachnospiraceae bacterium NK4A179
gttgatgagaagagcccaagatagagggcaataac

SEQ ID NO: 398 - DNA, 35 bp, Clostridium aminophilum DSM 10710
gtctattgccctctatatcgggctgttctccaaac

SEQ ID NO: 399 - DNA, 36 bp, Carnobacterium gallinarum DSM 4847
attaaagactacctctaaatgtaagaggactataac

SEQ ID NO: 400 - DNA, 36 bp, Carnobacterium gallinarum DSM 4847
aatataaactacctctaaatgtaagaggactataac

SEQ ID NO: 401 - DNA, 36 bp, Paludibacter propionicigenes WB4
cttgtggattatcccaaaattgaagggaactacaac

SEQ ID NO: 402 - DNA, 36 bp, Listeria weihenstephanensis FSL R9-0317
gatttagagtacctcaaaatagaagaggtctaaaac

SEQ ID NO: 403 - DNA, 36 bp, Listeriaceae bacterium FSL M6-0635
gatttagagtacctcaaaacaaaagaggactaaaac

SEQ ID NO: 404 - DNA, 36 bp, Leptotrichia wadei F0279
gatatagataaccccaaaaacgaagggatctaaaac

SEQ ID NO: 405 - DNA, 36 bp, Rhodobacter capsulatus SB 1003
gcctcacatcaccgccaagacgacggcggactgaac

SEQ ID NO: 406 - DNA, 36 bp, Rhodobacter capsulatus R121; identical to SEQ ID NO: 405

SEQ ID NO: 407 - DNA, 36 bp, Rhodobacter capsulatus DE442; identical to SEQ ID NO: 405

SEQ ID NO: 408 - protein, 1389 aa, Artificial Sequence
  Cas13a
MGNLFGHKRWYEVRDKKDFKIKRKVKVKRNYDGNKYILNINENNNKEKIDNNKFIRKYINYKKNDNILKEFTRKFHAGNILFKLKGKEGIIRIENNDDFLETEEVVLYIEAYGKSEKLKALGITKKKIIDEAIRQGITKDDKKIEIKRQENEEEIEIDIRDEYTNKTLNDCSIILRIIENDELETKKSIYEIFKNINMSLYKIIEKIIENETEKVFENRYYEEHLREKLLKDDKIDVILTNFMEIREKIKSNLEILGFVKFYLNVGGDKKKSKNKKMLVEKILNINVDLTVEDIADFVIKELEFWNITKRIEKVKKVNNEFLEKRRNRTYIKSYVLLDKHEKFKIERENKKDKIVKFFVENIKNNSIKEKIEKILAEFKIDELIKKLEKELKKGNCDTEIFGIFKKHYKVNFDSKKFSKKSDEEKELYKIIYRYLKGRIEKILVNEQKVRLKKMEKIEIEKILNESILSEKILKRVKQYTLEHIMYLGKLRHNDIDMTTVNTDDFSRLHAKEELDLELITFFASTNMELNKIFSRENINNDENIDFFGGDREKNYVLDKKILNSKIKIIRDLDFIDNKNNITNNFIRKFTKIGTNERNRILHAISKERDLQGTQDDYNKVINIIQNLKISDEEVSKALNLDVVFKDKKNIITKINDIKISEENNNDIKYLPSFSKVLPEILNLYRNNPKNEPFDTIETEKIVLNALIYVNKELYKKLILEDDLEENESKNIFLQELKKTLGNIDEIDENIIENYYKNAQISASKGNNKAIKKYQKKVIECYIGYLRKNYEELFDFSDFKMNIQEIKKQIKDINDNKTYERITVKTSDKTIVINDDFEYIISIFALLNSNAVINKIRNRFFATSVWLNTSEYQNIIDILDEIMQLNTLRNECITENWNLNLEEFIQKMKEIEKDFDDFKIQTKKEIFNNYYEDIKNNILTEFKDDINGCDVLEKKLEKIVIFDDETKFEIDKKSNILQDEQRKLSNINKKDLKKKVDQYIKDKDQEIKSKILCRIIFNSDFLKKYKKEIDNLIEDMESENENKFQEIYYPKERKNELYIYKKNLFLNIGNPNFDKIYGLISNDIKMADAKFLFNIDGKNIRKNKISEIDAILKNLNDKLNGYSKEYKEKYIKKLKENDDFFAKNIQNKNYKSFEKDYNRVSEYKKIRDLVEFNYLNKIESYLIDINWKLAIQMARFERDMHYIVNGLRELGIIKLSGYNTGISRAYPKRNGSDGFYTTTAYYKFFDEESYKKFEKICYGFGIDLSENSEINKPENESIRNYISHFYIVRNPFADYSIAEQIDRVSNLLSYSTRYNNSTYASVFEVFKKDVNLDYDELKKKFKLIGNNDILERLMKPKKVSVLELESYNSDYIKNLIIELLTKIENTNDTL

SEQ ID NO: 409 - protein, 1221 aa, Bergeyella zoohelcum ATCC 43767
MENKTSLGNNIYYNPFKPQDKSYFAGYFNAAMENTDSVFRELGKRLKGKEYTSENFFDAIFKENISLVEYERYVKLLSDYFPMARLLDKKEVPIKERKENFKKNFKGIIKAVRDLRNFYTHKEHGEVEITDEIFGVLDEMLKSTVLTVKKKKVKTDKTKEILKKSIEKQLDILCQKKLEYLRDTARKIEEKRRNQRERGEKELVAPFKYSDKRDDLIAAIYNDAFDVYIDKKKDSLKESSKAKYNTKSDPQQEEGDLKIPISKNGVVFLLSLFLTKQEIHAFKSKIAGFKATVIDEATVSEATVSHGKNSICFMATHEIFSHLAYKKLKRKVRTAEINYGEAENAEQLSVYAKETLMMQMLDELSKVPDVVYQNLSEDVQKTFIEDWNEYLKENNGDVGTMEEEQVIHPVIRKRYEDKFNYFAIRFLDEFAQFPTLRFQVHLGNYLHDSRPKENLISDRRIKEKITVFGRLSELEHKKALFIKNTETNEDREHYWEIFPNPNYDFPKENISVNDKDFPIAGSILDREKQPVAGKIGIKVKLLNQQYVSEVDKAVKAHQLKQRKASKPSIQNIIEEIVPINESNPKEAIVFGGQPTAYLSMNDIHSILYEFFDKWEKKKEKLEKKGEKELRKEIGKELEKKIVGKIQAQIQQIIDKDTNAKILKPYQDGNSTAIDKEKLIKDLKQEQNILQKLKDEQTVREKEYNDFIAYQDKNREINKVRDRNHKQYLKDNLKRKYPEAPARKEVLYYREKGKVAVWLANDIKRFMPTDFKNEWKGEQHSLLQKSLAYYEQCKEELKNLLPEKVFQHLPFKLGGYFQQKYLYQFYTCYLDKRLEYISGLVQQAENFKSENKVFKKVENECFKFLKKQNYTHKELDARVQSILGYPIFLERGFMDEKPTIIKGKTFKGNEALFADWFRYYKEYQNFQTFYDTENYPLVELEKKQADRKRKTKIYQQKKNDVFTLLMAKHIFKSVFKQDSIDQFSLEDLYQSREERLGNQERARQTGERNTNYIWNKTVDLKLCDGKITVENVKLKNVGDFIKYEYDQRVQAFLKYEENIEWQAFLIKESKEEENYPYVVEREIEQYEKVRREELLKEVHLIEEYILEKVKDKEILKKGDNQNFKYYILNGLLKQLKNEDVESYKVFNLNTEPEDVNINQLKQEATDLEQKAFVLTYIRNKFAHNQLPKKEFWDYCQEKYGKEKTYAEYFAEVFKKEKEALIK

SEQ ID NO: 410 - protein, 3 aa, Homo sapiens
GGS

SEQ ID NO: 411 - protein, 7 aa, Artificial Sequence
  linker sequence
VDTANGS

SEQ ID NO: 412 - protein, 7 aa, Artificial Sequence
  linker sequence
VDTGNGS

SEQ ID NO: 413 - protein, 16 aa, Artificial Sequence
  linker sequence
SGSETPGTSESATPES

SEQ ID NO: 414 - protein, 10 aa, Homo sapiens
GGGGSGGGGS

SEQ ID NO: 415 - protein, 15 aa, Homo sapiens
GGGGSGGGGSGGGGS

SEQ ID NO: 416 - protein, 20 aa, Homo sapiens
GGGGSGGGGSGGGGSGGGGS

SEQ ID NO: 417 - protein, 10 aa, Artificial Sequence
  linker sequence
EAAAKEAAAK

SEQ ID NO: 418 - protein, 15 aa, Artificial Sequence
  linker sequence
EAAAKEAAAKEAAAK

SEQ ID NO: 419 - protein, 20 aa, Artificial Sequence
  linker sequence
EAAAKEAAAKEAAAKEAAAK

SEQ ID NO: 420 - protein, 8 aa, Homo sapiens
APAPAPAP

SEQ ID NO: 421 - protein, 12 aa, Artificial Sequence
  linker sequence
APAPAPAPAPAP

SEQ ID NO: 422 - protein, 18 aa, Artificial Sequence
  linker sequence
APAPAPAPAPAPAPAPAP

SEQ ID NO: 423 - protein, 10 aa, Artificial Sequence
  linker sequence
GGGGSEAAAK

SEQ ID NO: 424 - protein, 10 aa, Artificial Sequence
  linker sequence
EAAAKGGGGS

SEQ ID NO: 425 - protein, 20 aa, Artificial Sequence
  linker sequence
GGGGSGGGGSEAAAKEAAAK

SEQ ID NO: 426 - protein, 20 aa, Artificial Sequence
  linker sequence
EAAAKEAAAKGGGGSGGGGS

SEQ ID NO: 427 - protein, 16 aa, Artificial Sequence
  linker sequence
RQTSPDPCPQLPLVPR

SEQ ID NO: 428 - protein, 7 aa, Artificial Sequence
  linker sequence
VDTGNWF

SEQ ID NO: 429 - protein, 14 aa, Artificial Sequence
  linker sequence
VDTANGSVDTGNGS

SEQ ID NO: 430 - protein, 10 aa, Artificial Sequence
  linker sequence
ARNVEERLCL

SEQ ID NO: 431 - protein, 9 aa, Homo sapiens
AIELNPSNA

SEQ ID NO: 432 - protein, 7 aa, Homo sapiens
ICGSRNL

SEQ ID NO: 433 - protein, 9 aa, Homo sapiens
VLATDMSKH

SEQ ID NO: 434 - protein, 8 aa, Homo sapiens
FLRELPEP

SEQ ID NO: 435 - protein, 9 aa, Homo sapiens
LIPKDQYYC

SEQ ID NO: 436 - protein, 8 aa, Artificial Sequence
  FLAG Tag
DYKDDDDK

SEQ ID NO: 437 - protein, 7 aa, Artificial Sequence
  SV40 NLS Tag
PKKKRKV

SEQ ID NO: 438 - protein, 9 aa, Homo sapiens
GKKRKRSRK

SEQ ID NO: 439 - protein, 7 aa, Saccharomyces cerevisiae
GKKRSKV

SEQ ID NO: 440 - protein, 18 aa, Homo sapiens
KRALPNNTSSSPQPKKKP

SEQ ID NO: 441 - protein, 9 aa, Homo sapiens
PAAKRVKLD

SEQ ID NO: 442 - protein, 17 aa, Homo sapiens
KRSAEGSNPPKPLKKLR

SEQ ID NO: 443 - protein, 19 aa, Homo sapiens
KRPAATKKAGQAKKKKLDK

SEQ ID NO: 444 - protein, 349 aa, Artificial Sequence
  8PUF - frame 3
GRSRLLEDFRNNRYPNLQLREIAGHIMEFSQDQHGSRFIELKLERATPAERQLVFNEILQAAYQLMVDVFGCYVIQKFFEFGSLEQKLALAERIRGHVLSLALQMYGSYVIRKALEFIPSDQQNEMVRELDGHVLKCVKDQNGSYVVEKCIECVQPQSLQFIIDAFKGQVFALSTHPYGCRVIQRILEHCLPDQTLPILEELHQHTEQLVQDQYGSYVIRHVLEHGRPEDKSKIVAEIRGNVLVLSQHKFASNVVEKCVTHASRTERAVLIDEVCTMNDGPHSALYTMMKDQYACYVVQKMIDVAEPGQRKIVMHKIRPHIATLRKYTYGKHILAKLEKYYMKNGVDLG

SEQ ID NO: 445 - protein, 565 aa, Artificial Sequence
  14PUF - frame 3
GRSRLLEDFRNNRYPNLQLREIAGHIMEFSQDQHGSRFIELKLERATPAERQLVFNEILQAAYQLMVDVFGCYVIQKFFEFGSLEQKLALAERIRGHVLSLALQMYGSYVIRKALEFIPSDQQNEMVRELDGHVLKCVKDQNGSYVVEKCIECVQPQSLQFIIDAFKGQVFALSTHPYGCRVIQRILEHCLPDQTLPILEELHQHIMEFSQDQHGSRFIRLKLERATPAERQLVFNEILQAAYQLMVDVFGSYVIEKFFEFGSLEQKLALAERIRGHVLSLALQMYGCRVIQKALEFIPSDQQNEMVRELDGHVLKCVKDQNGSYVVRKCIECVQPQSLQFIIDAFKGQVFALSTHPYGSRVIERILEHCLPDQTLPILEELHQHTEQLVQDQYGCYVIQHVLEHGRPEDKSKIVAEIRGHTEQLVQDQYGSYVIRHVLEHGRPEDKSKIVAEIRGNVLVLSQHKFASNVVEKCVTHASRTERAVLIDEVCTMNDGPHSALYTMMKDQYACYVVQKMIDVAEPGQRKIVMHKIRPHIATLRKYTYGKHILAKLEKYYMKNGVDLG

SEQ ID NO: 446 - protein, 565 aa, Artificial Sequence
  14PUF - frame 3
GRSRLLEDFRNNRYPNLQLREIAGHIMEFSQDQHGSRFIELKLERATPAERQLVFNEILQAAYQLMVDVFGCYVIQKFFEFGSLEQKLALAERIRGHVLSLALQMYGSYVIRKALEFIPSDQQNEMVRELDGHVLKCVKDQNGSYVVEKCIECVQPQSLQFIIDAFKGQVFALSTHPYGCRVIQRILEHCLPDQTLPILEELHQHTEQLVQDQYGSYVIRHVLEHGRPEDKSKIVAEIRGHIMEFSQDQHGSRFIELKLERATPAERQLVFNEILQAAYQLMVDVFGCYVIQKFFEFGSLEQKLALAERIRGHVLSLALQMYGSYVIRKALEFIPSDQQNEMVRELDGHVLKCVKDQNGSYVVEKCIECVQPQSLQFIIDAFKGQVFALSTHPYGCRVIQRILEHCLPDQTLPILEELHQHTEQLVQDQYGSYVIRHVLEHGRPEDKSKIVAEIRGNVLVLSQHKFASNVVEKCVTHASRTERAVLIDEVCTMNDGPHSALYTMMKDQYACYVVQKMIDVAEPGQRKIVMHKIRPHIATLRKYTYGKHILAKLEKYYMKNGVDLG

SEQ ID NO: 447 - protein, 608 aa, Artificial Sequence
  15PUF - frame 3
GRSRLLEDFRNNRYPNLQLREIAGHIMEFSQDQHGSRFIRLKLERATPAERQLVFNEILQAAYQLMVDVFGSYVIEKFFEFGSLEQKLALAERIRGHVLSLALQMYGCRVIQKALEFIPSDQQNEMVRELDGHVLKCVKDQNGSYVVRKCIECVQPQSLQFIIDAFKGQVFALSTHPYGSRVIERILEHCLPDQTLPILEELHQHIMEFSQDQHGSRFIQLKLERATPAERQLVFNEILQAAYQLMVDVFGSYVIRKFFEFGSLEQKLALAERIRGHVLSLALQMYGSRVIEKALEFIPSDQQNEMVRELDGHVLKCVKDQNGCHVVQKCIECVQPQSLQFIIDAFKGQVFALSTHPYGSRVIRRILEHCLPDQTLPILEELHQHTEQLVQDQYGSYVIEHVLEHGRPEDKSKIVAEIRGNVLVLSQHKFACNVVQKCVTHASRTERAVLIDEVCTMNDGPHSHTEQLVQDQYGSYVIRHVLEHGRPEDKSKIVAEIRGNVLVLSQHKFASNVVEKCVTHASRTERAVLIDEVCTMNDGPHSALYTMMKDQYACYVVQKMIDVAEPGQRKIVMHKIRPHIATLRKYTYGKHILAKLEKYYMKNGVDLG

SEQ ID NO: 448 - protein, 608 aa, Artificial Sequence
  15PUF - frame 3
GRSRLLEDFRNNRYPNLQLREIAGHIMEFSQDQHGSRFIRLKLERATPAERQLVFNEILQAAYQLMVDVFGSYVIEKFFEFGSLEQKLALAERIRGHVLSLALQMYGCRVIQKALEFIPSDQQNEMVRELDGHVLKCVKDQNGSYVVRKCIECVQPQSLQFIIDAFKGQVFALSTHPYGSRVIERILEHCLPDQTLPILEELHQHTEQLVQDQYGCYVIQHVLEHGRPEDKSKIVAEIRGHIMEFSQDQHGSRFIRLKLERATPAERQLVFNEILQAAYQLMVDVFGSYVIEKFFEFGSLEQKLALAERIRGHVLSLALQMYGCRVIQKALEFIPSDQQNEMVRELDGHVLKCVKDQNGSYVVRKCIECVQPQSLQFIIDAFKGQVFALSTHPYGSRVIERILEHCLPDQTLPILEELHQHTEQLVQDQYGCYVIQHVLEHGRPEDKSKIVAEIRGNVLVLSQHKFASYVVRKCVTHASRTERAVLIDEVCTMNDGPHSNVLVLSQHKFASNVVEKCVTHASRTERAVLIDEVCTMNDGPHSALYTMMKDQYACYVVQKMIDVAEPGQRKIVMHKIRPHIATLRKYTYGKHILAKLEKYYMKNGVDLG

SEQ ID NO: 449 - protein, 644 aa, Artificial Sequence
  16PUF - frame 3
GRSRLLEDFRNNRYPNLQLREIAGHIMEFSQDQHGSRFIQLKLERATPAERQLVFNEILQAAYQLMVDVFGSYVIRKFFEFGSLEQKLALAERIRGHVLSLALQMYGSRVIEKALEFIPSDQQNEMVRELDGHVLKCVKDQNGCHVVQKCIECVQPQSLQFIIDAFKGQVFALSTHPYGSRVIRRILEHCLPDQTLPILEELHQHIMEFSQDQHGSRFIELKLERATPAERQLVFNEILQAAYQLMVDVFGCYVIQKFFEFGSLEQKLALAERIRGHVLSLALQMYGSYVIRKALEFIPSDQQNEMVRELDGHVLKCVKDQNGSYVVEKCIECVQPQSLQFIIDAFKGQVFALSTHPYGCRVIQRILEHCLPDQTLPILEELHQHTEQLVQDQYGSYVIRHVLEHGRPEDKSKIVAEIRGNVLVLSQHKFASNVVEKCVTHASRTERAVLIDEVCTMNDGPHSALYTMMKDQYACYVVQKMIDVAEPGQRKIVMHKIRPHTEQLVQDQYGSYVIRHVLEHGRPEDKSKIVAEIRGNVLVLSQHKFASNVVEKCVTHASRTERAVLIDEVCTMNDGPHSALYTMMKDQYACYVVQKMIDVAEPGQRKIVMHKIRPHIATLRKYTYGKHILAKLEKYYMKNGVDLG

SEQ ID NO: 450 - protein, 644 aa, Artificial Sequence
  16PUF - frame 3
GRSRLLEDFRNNRYPNLQLREIAGHIMEFSQDQHGSRFIQLKLERATPAERQLVFNEILQAAYQLMVDVFGSYVIRKFFEFGSLEQKLALAERIRGHVLSLALQMYGSRVIEKALEFIPSDQQNEMVRELDGHVLKCVKDQNGCHVVQKCIECVQPQSLQFIIDAFKGQVFALSTHPYGSRVIRRILEHCLPDQTLPILEELHQHTEQLVQDQYGSYVIEHVLEHGRPEDKSKIVAEIRGHIMEFSQDQHGSRFIQLKLERATPAERQLVFNEILQAAYQLMVDVFGSYVIRKFFEFGSLEQKLALAERIRGHVLSLALQMYGSRVIEKALEFIPSDQQNEMVRELDGHVLKCVKDQNGCHVVQKCIECVQPQSLQFIIDAFKGQVFALSTHPYGSRVIRRILEHCLPDQTLPILEELHQHTEQLVQDQYGSYVIEHVLEHGRPEDKSKIVAEIRGNVLVLSQHKFACNVVQKCVTHASRTERAVLIDEVCTMNDGPHSALYTMMKDQYASYVVRKMIDVAEPGQRKIVMHKIRPNVLVLSQHKFASNVVEKCVTHASRTERAVLIDEVCTMNDGPHSALYTMMKDQYACYVVQKMIDVAEPGQRKIVMHKIRPHIATLRKYTYGKHILAKLEKYYMKNGVDLG

SEQ ID NO: 451 - protein, 644 aa, Artificial Sequence
  16PUF - frame 3
GRSRLLEDFRNNRYPNLQLREIAGHIMEFSQDQHGSRFIQLKLERATPAERQLVFNEILQAAYQLMVDVFGSYVIRKFFEFGSLEQKLALAERIRGHVLSLALQMYGSRVIEKALEFIPSDQQNEMVRELDGHVLKCVKDQNGCHVVQKCIECVQPQSLQFIIDAFKGQVFALSTHPYGSRVIRRILEHCLPDQTLPILEELHQHTEQLVQDQYGSYVIEHVLEHGRPEDKSKIVAEIRGNVLVLSQHKFACNVVQKCVTHASRTERAVLIDEVCTMNDGPHSALYTMMKDQYASYVVRKMIDVAEPGQRKIVMHKIRPHIMEFSQDQHGSRFIELKLERATPAERQLVFNEILQAAYQLMVDVFGCYVIQKFFEFGSLEQKLALAERIRGHVLSLALQMYGSYVIRKALEFIPSDQQNEMVRELDGHVLKCVKDQNGSYVVEKCIECVQPQSLQFIIDAFKGQVFALSTHPYGCRVIQRILEHCLPDQTLPILEELHQHTEQLVQDQYGSYVIRHVLEHGRPEDKSKIVAEIRGNVLVLSQHKFASNVVEKCVTHASRTERAVLIDEVCTMNDGPHSALYTMMKDQYACYVVQKMIDVAEPGQRKIVMHKIRPHIATLRKYTYGKHILAKLEKYYMKNGVDLG

SEQ ID NO: 452 - DNA, 1047 bp, Artificial Sequence
  8PUF - frame 2 R4 Y13 nucleic acid sequence
ggccgcagccgccttttggaagattttcgaaacaaccggtaccccaatttacaactgcgggagattgccggacatataatggaattttcccaagaccagcatgggtccagattcattcgcctgaaactggagcgtgccacaccagctgagcgccagcttgtcttcaatgaaatcctccaggctgcctaccaactcatggtggatgtgtttggtagttacgtcattgaaaagttctttgaatttggcagtcttgaacagaagctggctttggcagaacggattcgaggtcacgtcctgtcattggcactacagatgtatggctgtcgtgttatccagaaagctcttgagtttattccttcagaccagcagaatgagatggttcgggaactagatggccatgtcttgaagtgtgtgaaagatcagaatggcagttacgtggttcgcaaatgcattgaatgtgtacagccccagtctttgcaatttatcatcgatgcgtttaagggacaggtatttgccttatccacacatccttatggctcccgagtgattgagagaatcctggagcactgtctccctgaccagacactccctattttagaggagcttcaccagcacacagagcagcttgtacaggatcaatatggatgttatgtaatccagcatgtactggagcacggtcgtcctgaggataaaagcaaaattgtagcagaaatccgaggcaatgtacttgtattgagtcagcacaaatttgcaagctatgttgtgcgcaagtgtgttactcacgcctcacgtacggagcgcgctgtgctcatcgatgaggtgtgcaccatgaacgacggtccccacagtgccttatacaccatgatgaaggaccagtatgccagctacgtggtcgagaagatgattgacgtggcggagccaggccagcggaagatcgtcatgcataagatccgaccccacatcgcaactcttcgtaagtacacctatggcaagcacattctggccaagctggagaagtactacatgaagaacggtgttgacttaggc

SEQ ID NO: 453 - RNA, 8 nt, Homo sapiens
cagcagca

SEQ ID NO: 454 - RNA, 14 nt, Homo sapiens
cagcagcagcagca

SEQ ID NO: 455 - RNA, 15 nt, Homo sapiens
cagcagcagcagcag

SEQ ID NO: 456 - RNA, 16 nt, Homo sapiens
cagcagcagcagcagc

SEQ ID NO: 457 - DNA, 26 bp, Homo sapiens
tgctgctgctgctgctgctgctgctg

SEQ ID NO: 458 - DNA, 26 bp, Homo sapiens
gctgctgctgctgctgctgctgctgc

SEQ ID NO: 459 - DNA, 26 bp, Homo sapiens
ctgctgctgctgctgctgctgctgct

SEQ ID NO: 460 - DNA, 1686 bp, Artificial Sequence
  8PUF-E17 fusion protein insert
atggactataaagatgacgatgataaacccaaaaagaaacgcaaggtgggacgaagccgactcttggaagacttcagaaacaatcggtatccgaaccttcagctgagagaaattgctggtcacatcatggaattttctcaagatcaacatggaagccggtttattgaacttaaactcgaacgagccaccccggccgaaaggcaattggtgttcaatgaaattcttcaggccgcataccaactcatggttgatgtttttgggaactatgttattcaaaagttttttgagttcgggtcactggagcaaaagttggcattggcagagcgaatccggggccatgttctgagcctcgctctccaaatgtacggtagttatgtcattcgcaaagcactcgagttcataccatcagatcaacagaatgagatggtgcgggagctggatgggcatgttttgaaatgcgtgaaagaccaaaacggtagctacgtagttgagaaatgcatcgaatgcgtccaaccacagtctctccaatttattatagatgcatttaagggtcaggttttcgcgctttctacgcacccgtatgggaaccgagtgattcagagaatcttggagcactgcctgccggatcagacactccctatcttggaggaattgcaccagcataccgaacaattggtgcaagatcaatacggttcatatgttattcggcacgttcttgagcatggaaggccagaggacaagtcaaagatcgtcgctgagattagaggtaacgtattggtgctctcacaacacaaatttgcatctaatgtggtggagaaatgtgttactcatgcttctagaacggaaagggcagttctcatagacgaagtttgcacaatgaatgatggtcctcatagcgcactttataccatgatgaaggaccagtatgcaaactatgtcgtccagaaaatgatcgatgtggcggagcccggtcaacggaaaatcgtgatgcacaaaatccgacctcacattgctacactcagaaaatacacgtatggaaaacatattctggctaagctggagaaatattacatgaagaatggagtggatctgggggtggatactgccaatggcagcggtggtggcacccctaaggctcccaacctggagcctccactcccagaagaggaaaaggagggcagcgacctgagaccagtggtcatcgatgggagcaacgtggccatgagccatgggaacaaggaggtcttctcctgccggggcatcctgctggcagtgaactggtttctggagcggggccacacagacatcacagtgtttgtgccatcctggaggaaggagcagcctcggcccgacgtgcccatcacagaccagcacatcctgcgggaactggagaagaagaagatcctggtgttcacaccatcacgacgcgtgggtggcaagcgggtggtgtgctatgacgacagattcattgtgaagctggcctacgagtctgacgggatcgtggtttccaacgacacataccgtgacctccaaggcgagcggcaggagtggaagcgcttcatcgaggagcggctgctcatgtactccttcgtcaatgacaagtttatgccccctgatgacccactgggccggcacgggcccagcctggacaacttcctgcgtaagaagccactcactttggagtaa

SEQ ID NO: 461 - protein, 608 aa, Artificial Sequence
  15PUF - frame 3
GRSRLLEDFRNNRYPNLQLREIAGHIMEFSQDQHGSRFIRLKLERATPAERQLVFNEILQAAYQLMVDVFGSYVIEKFFEFGSLEQKLALAERIRGHVLSLALQMYGCRVIQKALEFIPSDQQNEMVRELDGHVLKCVKDQNGSYVVRKCIECVQPQSLQFIIDAFKGQVFALSTHPYGSRVIERILEHCLPDQTLPILEELHQHTEQLVQDQYGCYVIQHVLEHGRPEDKSKIVAEIRGNVLVLSQHKFASYVVRKCVTHASRTERAVLIDEVCTMNDGPHSHIMEFSQDQHGSRFIELKLERATPAERQLVFNEILQAAYQLMVDVFGCYVIQKFFEFGSLEQKLALAERIRGHVLSLALQMYGSYVIRKALEFIPSDQQNEMVRELDGHVLKCVKDQNGSYVVEKCIECVQPQSLQFIIDAFKGQVFALSTHPYGCRVIQRILEHCLPDQTLPILEELHQHTEQLVQDQYGSYVIRHVLEHGRPEDKSKIVAEIRGNVLVLSQHKFASNVVEKCVTHASRTERAVLIDEVCTMNDGPHSALYTMMKDQYACYVVQKMIDVAEPGQRKIVMHKIRPHIATLRKYTYGKHILAKLEKYYMKNGVDLG

SEQ ID NO: 462 - protein, 11 aa, Homo sapiens
QHGSRFIQLKL

SEQ ID NO: 463 - protein, 11 aa, Homo sapiens
VFGNYVIQKFF

SEQ ID NO: 464 - protein, 11 aa, Homo sapiens
MYGCRVIQKAL

SEQ ID NO: 465 - protein, 11 aa, Homo sapiens
QNGNHVVQKCI

SEQ ID NO: 466 - protein, 11 aa, Homo sapiens
PYGCRVIQRIL

SEQ ID NO: 467 - protein, 11 aa, Homo sapiens
QYGNYVIQHVL

SEQ ID NO: 468 - protein, 11 aa, Homo sapiens
KFASNVVEKCV

SEQ ID NO: 469 - protein, 11 aa, Homo sapiens
QYANYVVQKMI

SEQ ID NO: 470 - DNA, 1047 bp, Homo sapiens
ggcaggagcaggcttttggaagattttcgaaacaaccggtaccccaatttacaactgcgggagattgctggacatataatggaattttcccaagaccagcatgggtccagattcattcagctgaaactggagcgtgccacaccagctgagcgccagcttgtcttcaatgaaatcctccaggctgcctaccaactcatggtggatgtgtttggtaattacgtcattcagaagttctttgaatttggcagtcttgaacagaagctggctttggcagaacggattcgaggccacgtcctgtcattggcactacagatgtatggctgccgtgttatccagaaagctcttgagtttattccttcagaccagcagaatgagatggttcgggaactagatggccatgtcttgaagtgtgtgaaagatcagaatggcaatcacgtggttcagaaatgcattgaatgtgtacagccccagtctttgcaatttatcatcgatgcgtttaagggacaggtatttgccttatccacacatccttatggctgccgagtgattcagagaatcctggagcactgtctccctgaccagacactccctattttagaggagcttcaccagcacacagagcagcttgtacaggatcaatatggaaattatgtaatccaacatgtactggagcacggtcgtcctgaggataaaagcaaaattgtagcagaaatccgaggcaatgtacttgtattgagtcagcacaaatttgcaagcaatgttgtggagaagtgtgttactcacgcctcacgtacggagcgcgctgtgctcatcgatgaggtgtgcaccatgaacgacggtccccacagtgccttatacaccatgatgaaggaccagtatgccaactacgtggtccagaagatgattgacgtggcggagccaggccagcggaagatcgtcatgcataagatccggccccacatcgcaactcttcgtaagtacacctatggcaagcacattctggccaagctggagaagtactacatgaagaacggtgttgacttaggg

SEQ ID NO: 471 - protein, 351 aa, Homo sapiens
GRSRLLEDFRNNRYPNLQLREIAGHIMEFSQDQHGSRFIQLKLERATPAERQLVFNEILQAAYQLMVDVFGNYVIQKFFEFGSLEQKLALAERIRGHVLSLALQMYGCRVIQKALEFIPSDQQVINEMVRELDGHVLKCVKDQNGNHVVQKCIECVQPQSLQFIIDAFKGQVFALSTHPYGCRVIQRILEHCLPDQTLPILEELHQHTEQLVQDQYGNYVIQHVLEHGRPEDKSKIVAEIRGNVLVLSQHKFASNVVEKCVTHASRTERAVLIDEVCTMNDGPHSALYTMMKDQYANYVVQKMIDVAEPGQRKIVMHKIRPHIATLRKYTYGKHILAKLEKYYMKNGVDLG

SEQ ID NO: 472 - RNA, 8 nt, Homo sapiens
agcagcag

SEQ ID NO: 473 - RNA, 14 nt, Homo sapiens
agcagcagcagcag

SEQ ID NO: 474 - RNA, 15 nt, Homo sapiens
agcagcagcagcagc

SEQ ID NO: 475 - RNA, 16 nt, Homo sapiens
agcagcagcagcagca

SEQ ID NO: 476 - RNA, 8 nt, Homo sapiens
gcagcagc

SEQ ID NO: 477 - RNA, 14 nt, Homo sapiens
gcagcagcagcagc

SEQ ID NO: 478 - RNA, 15 nt, Homo sapiens
gcagcagcagcagca

SEQ ID NO: 479 - RNA, 16 nt, Homo sapiens
gcagcagcagcagcag

SEQ ID NO: 480 - protein, 349 aa, Artificial Sequence
  8PUF - frame 1
GRSRLLEDFRNNRYPNLQLREIAGHIMEFSQDQHGSRFIQLKLERATPAERQLVFNEILQAAYQLMVDVFGSYVIRKFFEFGSLEQKLALAERIRGHVLSLALQMYGSRVIEKALEFIPSDQQNEMVRELDGHVLKCVKDQNGCYVVQKCIECVQPQSLQFIIDAFKGQVFALSTHPYGSRVIRRILEHCLPDQTLPILEELHQHTEQLVQDQYGSYVIEHVLEHGRPEDKSKIVAEIRGNVLVLSQHKFACNVVQKCVTHASRTERAVLIDEVCTMNDGPHSALYTMMKDQYASYVVRKMIDVAEPGQRKIVMHKIRPHIATLRKYTYGKHILAKLEKYYMKNGVDLG

SEQ ID NO: 481 - protein, 565 aa, Artificial Sequence
  14PUF - frame 1
GRSRLLEDFRNNRYPNLQLREIAGHIMEFSQDQHGSRFIQLKLERATPAERQLVFNEILQAAYQLMVDVFGSYVIRKFFEFGSLEQKLALAERIRGHVLSLALQMYGSRVIEKALEFIPSDQQNEMVRELDGHVLKCVKDQNGCHVVQKCIECVQPQSLQFIIDAFKGQVFALSTHPYGSRVIRRILEHCLPDQTLPILEELHQHIMEFSQDQHGSRFIELKLERATPAERQLVFNEILQAAYQLMVDVFGCYVIQKFFEFGSLEQKLALAERIRGHVLSLALQMYGSYVIRKALEFIPSDQQNEMVRELDGHVLKCVKDQNGSYVVEKCIECVQPQSLQFIIDAFKGQVFALSTHPYGCRVIQRILEHCLPDQTLPILEELHQHTEQLVQDQYGSYVIRHVLEHGRPEDKSKIVAEIRGHTEQLVQDQYGSYVIEHVLEHGRPEDKSKIVAEIRGNVLVLSQHKFACNVVQKCVTHASRTERAVLIDEVCTMNDGPHSALYTMMKDQYASYVVRKMIDVAEPGQRKIVMHKIRPHIATLRKYTYGKHILAKLEKYYMKNGVDLG

SEQ ID NO: 482 - protein, 565 aa, Artificial Sequence
  14PUF - frame 1
GRSRLLEDFRNNRYPNLQLREIAGHIMEFSQDQHGSRFIQLKLERATPAERQLVFNEILQAAYQLMVDVFGSYVIRKFFEFGSLEQKLALAERIRGHVLSLALQMYGSRVIEKALEFIPSDQQNEMVRELDGHVLKCVKDQNGCHVVQKCIECVQPQSLQFIIDAFKGQVFALSTHPYGSRVIRRILEHCLPDQTLPILEELHQHTEQLVQDQYGSYVIEHVLEHGRPEDKSKIVAEIRGHIMEFSQDQHGSRFIQLKLERATPAERQLVFNEILQAAYQLMVDVFGSYVIRKFFEFGSLEQKLALAERIRGHVLSLALQMYGSRVIEKALEFIPSDQQNEMVRELDGHVLKCVKDQNGCHVVQKCIECVQPQSLQFIIDAFKGQVFALSTHPYGSRVIRRILEHCLPDQTLPILEELHQHTEQLVQDQYGSYVIEHVLEHGRPEDKSKIVAEIRGNVLVLSQHKFACNVVQKCVTHASRTERAVLIDEVCTMNDGPHSALYTMMKDQYASYVVRKMIDVAEPGQRKIVMHKIRPHIATLRKYTYGKHILAKLEKYYMKNGVDLG

SEQ ID NO: 483 - protein, 608 aa, Artificial Sequence
  15PUF - frame 1
GRSRLLEDFRNNRYPNLQLREIAGHIMEFSQDQHGSRFIELKLERATPAERQLVFNEILQAAYQLMVDVFGCYVIQKFFEFGSLEQKLALAERIRGHVLSLALQMYGSYVIRKALEFIPSDQQNEMVRELDGHVLKCVKDQNGSYVVEKCIECVQPQSLQFIIDAFKGQVFALSTHPYGCRVIQRILEHCLPDQTLPILEELHQHIMEFSQDQHGSRFIRLKLERATPAERQLVFNEILQAAYQLMVDVFGSYVIEKFFEFGSLEQKLALAERIRGHVLSLALQMYGCRVIQKALEFIPSDQQNEMVRELDGHVLKCVKDQNGSYVVRKCIECVQPQSLQFIIDAFKGQVFALSTHPYGSRVIERILEHCLPDQTLPILEELHQHTEQLVQDQYGCYVIQHVLEHGRPEDKSKIVAEIRGNVLVLSQHKFASYVVRKCVTHASRTERAVLIDEVCTMNDGPHSHTEQLVQDQYGSYVIEHVLEHGRPEDKSKIVAEIRGNVLVLSQHKFACNVVQKCVTHASRTERAVLIDEVCTMNDGPHSALYTMMKDQYASYVVRKMIDVAEPGQRKIVMHKIRPHIATLRKYTYGKHILAKLEKYYMKNGVDLG

SEQ ID NO: 484 - protein, 608 aa, Artificial Sequence
  15PUF - frame 1
GRSRLLEDFRNNRYPNLQLREIAGHIMEFSQDQHGSRFIELKLERATPAERQLVFNEILQAAYQLMVDVFGCYVIQKFFEFGSLEQKLALAERIRGHVLSLALQMYGSYVIRKALEFIPSDQQNEMVRELDGHVLKCVKDQNGSYVVEKCIECVQPQSLQFIIDAFKGQVFALSTHPYGCRVIQRILEHCLPDQTLPILEELHQHTEQLVQDQYGSYVIRHVLEHGRPEDKSKIVAEIRGHIMEFSQDQHGSRFIELKLERATPAERQLVFNEILQAAYQLMVDVFGCYVIQKFFEFGSLEQKLALAERIRGHVLSLALQMYGSYVIRKALEFIPSDQQNEMVRELDGHVLKCVKDQNGSYVVEKCIECVQPQSLQFIIDAFKGQVFALSTHPYGCRVIQRILEHCLPDQTLPILEELHQHTEQLVQDQYGSYVIRHVLEHGRPEDKSKIVAEIRGNVLVLSQHKFASNVVEKCVTHASRTERAVLIDEVCTMNDGPHSNVLVLSQHKFACNVVQKCVTHASRTERAVLIDEVCTMNDGPHSALYTMMKDQYASYVVRKMIDVAEPGQRKIVMHKIRPHIATLRKYTYGKHILAKLEKYYMKNGVDLG

SEQ ID NO: 485 - protein, 608 aa, Artificial Sequence
  15PUF - frame 1
GRSRLLEDFRNNRYPNLQLREIAGHIMEFSQDQHGSRFIELKLERATPAERQLVFNEILQAAYQLMVDVFGCYVIQKFFEFGSLEQKLALAERIRGHVLSLALQMYGSYVIRKALEFIPSDQQNEMVRELDGHVLKCVKDQNGSYVVEKCIECVQPQSLQFIIDAFKGQVFALSTHPYGCRVIQRILEHCLPDQTLPILEELHQHTEQLVQDQYGSYVIRHVLEHGRPEDKSKIVAEIRGNVLVLSQHKFASNVVEKCVTHASRTERAVLIDEVCTMNDGPHSHIMEFSQDQHGSRFIQLKLERATPAERQLVFNEILQAAYQLMVDVFGSYVIRKFFEFGSLEQKLALAERIRGHVLSLALQMYGSRVIEKALEFIPSDQQNEMVRELDGHVLKCVKDQNGCHVVQKCIECVQPQSLQFIIDAFKGQVFALSTHPYGSRVIRRILEHCLPDQTLPILEELHQHTEQLVQDQYGSYVIEHVLEHGRPEDKSKIVAEIRGNVLVLSQHKFACNVVQKCVTHASRTERAVLIDEVCTMNDGPHSALYTMMKDQYASYVVRKMIDVAEPGQRKIVMHKIRPHIATLRKYTYGKHILAKLEKYYMKNGVDLG

SEQ ID NO: 486 - protein, 644 aa, Artificial Sequence
  16PUF - frame 1
GRSRLLEDFRNNRYPNLQLREIAGHIMEFSQDQHGSRFIRLKLERATPAERQLVFNEILQAAYQLMVDVFGSYVIEKFFEFGSLEQKLALAERIRGHVLSLALQMYGCRVIQKALEFIPSDQQNEMVRELDGHVLKCVKDQNGSYVVRKCIECVQPQSLQFIIDAFKGQVFALSTHPYGSRVIERILEHCLPDQTLPILEELHQHIMEFSQDQHGSRFIQLKLERATPAERQLVFNEILQAAYQLMVDVFGSYVIRKFFEFGSLEQKLALAERIRGHVLSLALQMYGSRVIEKALEFIPSDQQNEMVRELDGHVLKCVKDQNGCHVVQKCIECVQPQSLQFIIDAFKGQVFALSTHPYGSRVIRRILEHCLPDQTLPILEELHQHTEQLVQDQYGSYVIEHVLEHGRPEDKSKIVAEIRGNVLVLSQHKFACNVVQKCVTHASRTERAVLIDEVCTMNDGPHSALYTMMKDQYASYVVRKMIDVAEPGQRKIVMHKIRPHTEQLVQDQYGSYVIEHVLEHGRPEDKSKIVAEIRGNVLVLSQHKFACNVVQKCVTHASRTERAVLIDEVCTMNDGPHSALYTMMKDQYASYVVRKMIDVAEPGQRKIVMHKIRPHIATLRKYTYGKHILAKLEKYYMKNGVDLG

SEQ ID NO: 487 - protein, 644 aa, Artificial Sequence
  16PUF - frame 1
GRSRLLEDFRNNRYPNLQLREIAGHIMEFSQDQHGSRFIRLKLERATPAERQLVFNEILQAAYQLMVDVFGSYVIEKFFEFGSLEQKLALAERIRGHVLSLALQMYGCRVIQKALEFIPSDQQNEMVRELDGHVLKCVKDQNGSYVVRKCIECVQPQSLQFIIDAFKGQVFALSTHPYGSRVIERILEHCLPDQTLPILEELHQHTEQLVQDQYGCYVIQHVLEHGRPEDKSKIVAEIRGHIMEFSQDQHGSRFIRLKLERATPAERQLVFNEILQAAYQLMVDVFGSYVIEKFFEFGSLEQKLALAERIRGHVLSLALQMYGCRVIQKALEFIPSDQQNEMVRELDGHVLKCVKDQNGSYVVRKCIECVQPQSLQFIIDAFKGQVFALSTHPYGSRVIERILEHCLPDQTLPILEELHQHTEQLVQDQYGCYVIQHVLEHGRPEDKSKIVAEIRGNVLVLSQHKFASYVVRKCVTHASRTERAVLIDEVCTMNDGPHSALYTMMKDQYASYVVEKMIDVAEPGQRKIVMHKIRPNVLVLSQHKFACNVVQKCVTHASRTERAVLIDEVCTMNDGPHSALYTMMKDQYASYVVRKMIDVAEPGQRKIVMHKIRPHIATLRKYTYGKHILAKLEKYYMKNGVDLG

SEQ ID NO: 488 - protein, 644 aa, Artificial Sequence
  16PUF - frame 1
GRSRLLEDFRNNRYPNLQLREIAGHIMEFSQDQHGSRFIRLKLERATPAERQLVFNEILQAAYQLMVDVFGSYVIEKFFEFGSLEQKLALAERIRGHVLSLALQMYGCRVIQKALEFIPSDQQNEMVRELDGHVLKCVKDQNGSYVVRKCIECVQPQSLQFIIDAFKGQVFALSTHPYGSRVIERILEHCLPDQTLPILEELHQHTEQLVQDQYGCYVIQHVLEHGRPEDKSKIVAEIRGNVLVLSQHKFASYVVRKCVTHASRTERAVLIDEVCTMNDGPHSALYTMMKDQYASYVVEKMIDVAEPGQRKIVMHKIRPHIMEFSQDQHGSRFIQLKLERATPAERQLVFNEILQAAYQLMVDVFGSYVIRKFFEFGSLEQKLALAERIRGHVLSLALQMYGSRVIEKALEFIPSDQQNEMVRELDGHVLKCVKDQNGCHVVQKCIECVQPQSLQFIIDAFKGQVFALSTHPYGSRVIRRILEHCLPDQTLPILEELHQHTEQLVQDQYGSYVIEHVLEHGRPEDKSKIVAEIRGNVLVLSQHKFACNVVQKCVTHASRTERAVLIDEVCTMNDGPHSALYTMMKDQYASYVVRKMIDVAEPGQRKIVMHKIRPHIATLRKYTYGKHILAKLEKYYMKNGVDLG

SEQ ID NO: 489 - protein, 36 aa, Artificial Sequence
  PUF R8 G recognition sequence
ALYTMMKDQYASYVVRKMIDVAEPGQRKIVMHKIRP

SEQ ID NO: 490 - protein, 36 aa, Artificial Sequence
  PUF R2 A recognition sequence
AAYQLMVDVFGCYVIQKFFEFGSLEQKLALAERIRG

SEQ ID NO: 491 - protein, 36 aa, Artificial Sequence
  PUF R2 G recognition sequence
AAYQLMVDVFGSYVIEKFFEFGSLEQKLALAERIRG

SEQ ID NO: 492 - protein, 36 aa, Artificial Sequence
  PUF R2 C recognition sequence
AAYQLMVDVFGSYVIRKFFEFGSLEQKLALAERIRG

SEQ ID NO: 493 - protein, 36 aa, Artificial Sequence
  PUF R8 A recognition sequence
ALYTMMKDQYACYVVQKMIDVAEPGQRKIVMHKIRP

SEQ ID NO: 494 - protein, 36 aa, Artificial Sequence; identical to SEQ ID NO: 489
  PUF R8 C recognition sequence

SEQ ID NO: 495 - protein, 24 aa, Artificial Sequence
  PUF R1' sequence
GRSRLLEDFRNNRYPNLQLREIAG

SEQ ID NO: 496 - protein, 30 aa, Artificial Sequence
  PUF R8' sequence
HIATLRKYTYGKHILAKLEKYYMKNGVDLG

SEQ ID NO: 497 - protein, 36 aa, Artificial Sequence
  PUF R1 A recognition sequence
HIMEFSQDQHGSRFIQLKLERATPAERQLVFNEILQ

SEQ ID NO: 498 - protein, 36 aa, Artificial Sequence
  PUF R1 G recognition sequence
HIMEFSQDQHGSRFIELKLERATPAERQLVFNEILQ

SEQ ID NO: 499 - protein, 36 aa, Artificial Sequence
  PUF R1 C recognition sequence
HIMEFSQDQHGSRFIRLKLERATPAERQLVFNEILQ

SEQ ID NO: 500 - protein, 36 aa, Artificial Sequence
  PUF R6 A recognition sequence
HTEQLVQDQYGCYVIQHVLEHGRPEDKSKIVAEIRG

SEQ ID NO: 501 - protein, 36 aa, Artificial Sequence
  PUF R6 G recognition sequence
HTEQLVQDQYGSYVIEHVLEHGRPEDKSKIVAEIRG

SEQ ID NO: 502 - protein, 36 aa, Artificial Sequence
  PUF R6 C recognition sequence
HTEQLVQDQYGSYVIRHVLEHGRPEDKSKIVAEIRG

SEQ ID NO: 503 - protein, 36 aa, Artificial Sequence
  PUF R4 A recognition sequence
HVLKCVKDQNGCYVVQKCIECVQPQSLQFIIDAFKG

SEQ ID NO: 504 - protein, 36 aa, Artificial Sequence
  PUF R4 G recognition sequence
HVLKCVKDQNGSYVVEKCIECVQPQSLQFIIDAFKG

SEQ ID NO: 505 - protein, 36 aa, Artificial Sequence
  PUF R4 C recognition sequence
HVLKCVKDQNGSYVVRKCIECVQPQSLQFIIDAFKG

SEQ ID NO: 506 - protein, 36 aa, Artificial Sequence
  PUF R3 A recognition sequence
HVLSLALQMYGCRVIQKALEFIPSDQQNEMVRELDG

SEQ ID NO: 507 - protein, 36 aa, Artificial Sequence
  PUF R3 G recognition sequence
HVLSLALQMYGSRVIEKALEFIPSDQQNEMVRELDG

SEQ ID NO: 508 - protein, 36 aa, Artificial Sequence
  PUF R3 C recognition sequence
HVLSLALQMYGSYVIRKALEFIPSDQQNEMVRELDG

SEQ ID NO: 509 - protein, 43 aa, Artificial Sequence
  PUF R7 A recognition sequence
NVLVLSQHKFACNVVQKCVTHASRTERAVLIDEVCTMNDGPHS

SEQ ID NO: 510 - protein, 43 aa, Artificial Sequence
  PUF R7 G recognition sequence
NVLVLSQHKFASNVVEKCVTHASRTERAVLIDEVCTMNDGPHS

SEQ ID NO: 511 - protein, 43 aa, Artificial Sequence
  PUF R7 C recognition sequence
NVLVLSQHKFASYVVRKCVTHASRTERAVLIDEVCTMNDGPHS

SEQ ID NO: 512 - protein, 36 aa, Artificial Sequence
  PUF R5 A recognition sequence
QVFALSTHPYGCRVIQRILEHCLPDQTLPILEELHQ

SEQ ID NO: 513 - protein, 36 aa, Artificial Sequence
  PUF R5 G recognition sequence
QVFALSTHPYGSRVIERILEHCLPDQTLPILEELHQ

SEQ ID NO: 514 - protein, 36 aa, Artificial Sequence
  PUF R5 C recognition sequence
QVFALSTHPYGSRVIRRILEHCLPDQTLPILEELHQ

SEQ ID NO: 515 - DNA, 1737 bp, Artificial Sequence
  PUF8 CAG - frame 2 Nucleotide Sequence (whole insert including Flag tag, H2B NLS, PUF and E17 fusion)
gactataaagatgacgatgataaaggaaaaaaaagaaaaagatcgagaaaaggatcgatagtagcggtctcccgaggcatgggccgcagccgccttttggaagattttcgaaacaaccggtaccccaatttacaactgcgggagattgccggacatataatggaattttcccaagaccagcatgggtccagattcattcgcctgaaactggagcgtgccacaccagctgagcgccagcttgtcttcaatgaaatcctccaggctgcctaccaactcatggtggatgtgtttggtagttacgtcattgaaaagttctttgaatttggcagtcttgaacagaagctggctttggcagaacggattcgaggtcacgtcctgtcattggcactacagatgtatggctgtcgtgttatccagaaagctcttgagtttattccttcagaccagcagaatgagatggttcgggaactagatggccatgtcttgaagtgtgtgaaagatcagaatggcagttacgtggttcgcaaatgcattgaatgtgtacagccccagtctttgcaatttatcatcgatgcgtttaagggacaggtatttgccttatccacacatccttatggctcccgagtgattgagagaatcctggagcactgtctccctgaccagacactccctattttagaggagcttcaccagcacacagagcagcttgtacaggatcaatatggatgttatgtaatccagcatgtactggagcacggtcgtcctgaggataaaagcaaaattgtagcagaaatccgaggcaatgtacttgtattgagtcagcacaaatttgcaagctatgttgtgcgcaagtgtgttactcacgcctcacgtacggagcgcgctgtgctcatcgatgaggtgtgcaccatgaacgacggtccccacagtgccttatacaccatgatgaaggaccagtatgccagctacgtggtcgagaagatgattgacgtggcggagccaggccagcggaagatcgtcatgcataagatccgaccccacatcgcaactcttcgtaagtacacctatggcaagcacattctggccaagctggagaagtactacatgaagaacggtgttgacttaggcggacgcagagaccggatggcagtggatactgccaatggcagcggtggtggcacccctaaggctcccaacctggagcctccactcccagaagaggaaaaggagggcagcgacctgagaccagtggtcatcgatgggagcaacgtggccatgagccatgggaacaaggaggtcttctcctgccggggcatcctgctggcagtgaactggtttctggagcggggccacacagacatcacagtgtttgtgccatcctggaggaaggagcagcctcggcccgacgtgcccatcacagaccagcacatcctgcgggaactggagaagaagaagatcctggtgttcacaccatcacgacgcgtgggtggcaagcgggtggtgtgctatgacgacagattcattgtgaagctggcctacgagtctgacgggatcgtggtttccaacgacacataccgtgacctccaaggcgagcggcaggagtggaagcgcttcatcgaggagcggctgctcatgtactccttcgtcaatgacaagtttatgccccctgatgacccactgggccggcacgggcccagcctggacaacttcctgcgtaagaagccactcactttggag

SEQ ID NO: 516-517 - skipped (2 entries)

SEQ ID NO: 518 - DNA, 3807 bp, Artificial Sequence
  CasRx-CAGguide3- whole nucleotide sequence from U6 promoter to SV-40 poly A
gagggcctatttcccatgattccttcatatttgcatatacgatacaaggctgttagagagataattggaattaatttgactgtaaacacaaagatattagtacaaaatacgtgacgtagaaagtaataatttcttgggtagtttgcagttttaaaattatgttttaaaatggactatcatatgcttaccgtaacttgaaagtatttcgatttcttggctttatatatcttgtggaaaggacgaaacaccgaacccctaccaactggtcggggtttgaaacctgctgctgctgctgctgctgctgcttttttttcctgcagccctccttaggtcttgaaaggagtgggaattggctccggtgcccgtcagtgggcagagcgcacatcgcccacagtccccgagaagttggggggaggggtcggcaattgatccggtgcctagagaaggtggcgcggggtaaactgggaaagtgatgtcgtgtactggctccgcctttttcccgagggtgggggagaaccgtatataagtgcagtagtcgccgtgaacgttctttttcgcaacgggtttgccgccagaacacaggtcacgcttaactagctagcagaaccatgagccccaagaagaagagaaaggtggaggccagcatcgaaaaaaaaaagtccttcgccaagggcatgggcgtgaagtccacactcgtgtccggctccaaagtgtacatgacaaccttcgccgaaggcagcgacgccaggctggaaaagatcgtggagggcgacagcatcaggagcgtgaatgagggcgaggccttcagcgctgaaatggccgataaaaacgccggctataagatcggcaacgccaaattcagccatcctaagggctacgccgtggtggctaacaaccctctgtatacaggacccgtccagcaggatatgctcggcctgaaggaaactctggaaaagaggtacttcggcgagagcgctgatggcaatgacaatatttgtatccaggtgatccataacatcctggacattgaaaaaatcctcgccgaatacattaccaacgccgcctacgccgtcaacaatatctccggcctggataaggacattattggattcggcaagttctccacagtgtatacctacgacgaattcaaagaccccgagcaccatagggccgctttcaacaataacgataagctcatcaacgccatcaaggcccagtatgacgagttcgacaacttcctcgataaccccagactcggctatttcggccaggcctttttcagcaaggagggcagaaattacatcatcaattacggcaacgaatgctatgacattctggccctcctgagcggactgaggcactgggtggtccataacaacgaagaagagtccaggatctccaggacctggctctacaacctcgataagaacctcgacaacgaatacatctccaccctcaactacctctacgacaggatcaccaatgagctgaccaactccttctccaagaactccgccgccaacgtgaactatattgccgaaactctgggaatcaaccctgccgaattcgccgaacaatatttcagattcagcattatgaaagagcagaaaaacctcggattcaatatcaccaagctcagggaagtgatgctggacaggaaggatatgtccgagatcaggaaaaatcataaggtgttcgactccatcaggaccaaggtctacaccatgatggactttgtgatttataggtattacatcgaagaggatgccaaggtggctgccgccaataagtccctccccgataatgagaagtccctgagcgagaaggatatctttgtgattaacctgaggggctccttcaacgacgaccagaaggatgccctctactacgatgaagctaatagaatttggagaaagctcgaaaatatcatgcacaacatcaaggaatttaggggaaacaagacaagagagtataagaagaaggacgcccctagactgcccagaatcctgcccgctggccgtgatgtttccgccttcagcaaactcatgtatgccctgaccatgttcctggatggcaaggagatcaacgacctcctgaccaccctgattaataaattcgataacatccagagcttcctgaaggtgatgcctctcatcggagtcaacgctaagttcgtggaggaatacgcctttttcaaagactccgccaagatcgccgatgagctgaggctgatcaagtccttcgctagaatgggagaacctattgccgatgccaggagggccatgtatatcgacgccatccgtattttaggaaccaacctgtcctatgatgagctcaaggccctcgccgacaccttttccctggacgagaacggaaacaagctcaagaaaggcaagcacggcatgagaaatttcattattaataacgtgatcagcaataaaaggttccactacctgatcagatacggtgatcctgcccacctccatgagatcgccaaaaacgaggccgtggtgaagttcgtgctcggcaggatcgctgacatccagaaaaaacagggccagaacggcaagaaccagatcgacaggtactacgaaacttgtatcggaaaggataagggcaagagcgtgagcgaaaaggtggacgctctcacaaagatcatcaccggaatgaactacgaccaattcgacaagaaaaggagcgtcattgaggacaccggcagggaaaacgccgagagggagaagtttaaaaagatcatcagcctgtacctcaccgtgatctaccacatcctcaagaatattgtcaatatcaacgccaggtacgtcatcggattccattgcgtcgagcgtgatgctcaactgtacaaggagaaaggctacgacatcaatctcaagaaactggaagagaagggattcagctccgtcaccaagctctgcgctggcattgatgaaactgcccccgataagagaaaggacgtggaaaaggagatggctgaaagagccaaggagagcattgacagcctcgagagcgccaaccccaagctgtatgccaattacatcaaatacagcgacgagaagaaagccgaggagttcaccaggcagattaacagggagaaggccaaaaccgccctgaacgcctacctgaggaacaccaagtggaatgtgatcatcagggaggacctcctgagaattgacaacaagacatgtaccctgttcagaaacaaggccgtccacctggaagtggccaggtatgtccacgcctatatcaacgacattgccgaggtcaattcctacttccaactgtaccattacatcatgcagagaattatcatgaatgagaggtacgagaaaagcagcggaaaggtgtccgagtacttcgacgctgtgaatgacgagaagaagtacaacgataggctcctgaaactgctgtgtgtgcctttcggctactgtatccccaggtttaagaacctgagcatcgaggccctgttcgataggaacgaggccgccaagttcgacaaggagaaaaagaaggtgtccggcaattcctaagcggccgcatccgatccaccggatctagataactgatcataatcagccataccacatttgtagaggttttacttgctttaaaaaacctcccacacctccccctgaacctgaaacataaaatgaatgcaattgttgttgttaacttgtttattgcagcttataatggttacaaataaagcaatagcatcacaaatttcacaaataaagcatttttttcactgcattctagttgtggtttgtccaaactcatcaatgtatctta

SEQ ID NO: 519 - DNA, 249 bp, Artificial Sequence
  Human U6 promoter
gagggcctatttcccatgattccttcatatttgcatatacgatacaaggctgttagagagataattggaattaatttgactgtaaacacaaagatattagtacaaaatacgtgacgtagaaagtaataatttcttgggtagtttgcagttttaaaattatgttttaaaatggactatcatatgcttaccgtaacttgaaagtatttcgatttcttggctttatatatcttgtggaaaggacgaaacacc

SEQ ID NO: 520 - DNA, 256 bp, Artificial Sequence
  EFS promoter
taggtcttgaaaggagtgggaattggctccggtgcccgtcagtgggcagagcgcacatcgcccacagtccccgagaagttggggggaggggtcggcaattgatccggtgcctagagaaggtggcgcggggtaaactgggaaagtgatgtcgtgtactggctccgcctttttcccgagggtgggggagaaccgtatataagtgcagtagtcgccgtgaacgttctttttcgcaacgggtttgccgccagaacacagg

SEQ ID NO: 521 - DNA, 9 bp, Artificial Sequence
  linker sequence
gaggccagc

SEQ ID NO: 522 - DNA, 2898 bp, Artificial Sequence; identical to SEQ ID NO: 144
  casrx

SEQ ID NO: 523 - DNA, 9 bp, Artificial Sequence
  linker sequence
ggatccgga

SEQ ID NO: 524 - DNA, 21 bp, Artificial Sequence
  SV40 NLS Tag
cctaagaaaaagaggaaggtg

SEQ ID NO: 525 - DNA, 9 bp, Artificial Sequence
  linker sequence
gcggccgct

SEQ ID NO: 526 - DNA, 27 bp, Artificial Sequence
  HA tag
tacccatacgatgttccagattacgct

SEQ ID NO: 527 - DNA, 225 bp, Artificial Sequence
  BGH poly A
tgtgccttctagttgccagccatctgttgtttgcccctcccccgtgccttccttgaccctggaaggtgccactcccactgtcctttcctaataaaatgaggaaattgcatcgcattgtctgagtaggtgtcattctattctggggggtggggtggggcaggacagcaagggggaggattgggaagacaatagcaggcatgctggggatgcggtgggctctatggc

SEQ ID NO: 528 - DNA, 3734 bp, Artificial Sequence
  Seq198-CTGguide3- whole nucleotide sequence from U6 promoter to SV-40 poly A
gagggcctatttcccatgattccttcatatttgcatatacgatacaaggctgttagagagataattagaattaatttgactgtaaacacaaagatattagtacaaaatacgtgacgtagaaagtaataatttcttgggtagtttgcagttttaaaattatgttttaaaatggactatcatatgcttaccgtaacttgaaagtatttcgatttcttggctttatatatcttgtggaaaggacgaaacaccgcaagtaaacccctaccaagtggtcggggtttgaaacctgctgctgctgctgctgctgctgctttttttccaccacactggactagtggatccctgcagccctccttaggtcttgaaaggagtgggaattggctccggtgcccgtcagtgggcagagcgcacatcgcccacagtccccgagaagttggggggaggggtcggcaattgatccggtgcctagagaaggtggcgcggggtaaactgggaaagtgatgtcgtgtactggctccgcctttttcccgagggtgggggagaaccgtatataagtgcagtagtcgccgtgaacgttctttttcgcaacgggtttgccgccagaacacaggtcacgcttaactaacgcgtgccgccaccatgatcgaaaagaagaagagctacgctaaaggaatgggcctgaaaagcaccatcgtgtccggctctaaagtgtacatgacaaccttcggcgatggcagcgaggccagactggagaaggtggttgagaacgatagcatcaagaccctgcacgagggcgaggccttcagcgctgagatgaccgacaacaacgccggctataagatcggaaacgtgaagttctcccaccctaacggctacgacgtggtcgccaacaaccctttctacaccggccctgtgcagcaggacatgctgggcctgaaagaaatcctggaaagacggtactttggatctagcacagacggtaacaataccatctgcatccaaatcatccacaatatcctggatatcgaaaaaattctggcagagtacatcacaaacgcagtgtacgccaccaacaacatcatcgatcctgataacgacgtgatcggcggcaagaagttcaccagcattaaaaccttcgcccagttctccgccagcgacagcagcaacgatttcgagcagttcctgaaaaatcccagactcggctacctgggcaaagcctttttctacaaggacggcaagcggaacaacagacagaaggatcctatcgagtgttaccacctgctggccctgctgtgcggcctgcgtaattgggttgtgcacaacaacgaggaaaaggacctgatcaagtacacctggttgtataacctggacaagtacctggatgccgagtacatcaccaccctgaactacatgtacaacgacatcggcgacgagttgacggactctttctccaagaacagcgccgccaatatcaactacatcgccgagaccctgggaatcgaccccaagaccttcgccgagcaatacttccggttctctatcatgaaggaacagaaaaacctgggattcaacctgaccaagctgagagaggtgatgctggaccggaaggacatgagcgagatcagagagaaccacaacgacttcgattctatcagagccaaggtgtacacaatgatggacttcgtgatctatcggtactacatcgaagaggccgctaaggtgaacgccgccaacaagagcctgcccgacaacgagaagagcctgagcgagaaagacatcttcgtgatttcactcagaggcagcttcaacgaagatcagaaggatcggctgtactacgacgaggcgcaaagactgtggtccaaggtgggcaaactgatgctgaaaatcaagaagttccggggcaaggacaccagaaagtacaagaatatgggcacacctagaatccggaggctgatccctgagggcagagatatcagcaccttctccaagctgatgtacgctctgactatgttcctggacggcaaggagatcaatgacctgctgaccacactgatcaacaaattcgacaacatccagagcttcttaaaggtgatgcctctgatcggcgtgaacgccaaatttgccgaagaatatagtttcttcaacaactctgaaaaaatcgccgacgaactgcggctgatcaagagctttgctagaatgggagaacccgtggctgacgccagaagagccatgtatatcgacgcaattcgcatcctgggcaccgatctctccgacgacgagctgaaggccctggctgattcttttagcctggacgagaacggcaataagctggggaagggcaagcacggcatgagaaacttcatcattaacaacgtgataacaaataagagattccactacctgatccggtacggcaacccagtccacctgcatgagatcgccaagaatgaagccgtggtcaagtttgtgctgggaagaatcgccgatatccagaagaaacagggccagaacggcaagaaccagatcgatagatactacgagacatgcatcggcaaggactcttctaaaagcgtggccgagaaggtgaacgccctgaccaagatcatcacaggcatgaactacgaccagttcgacagcagacggaacgtgatcgaaaacaccggcgccggcaacgccgagagagaaaagtacaagaagatcatcagcctgtacctgacagtgatctaccacatcctgaagaacattgttaatatcaactcaagatacgtgatcggatttcactgcgtggagagagatgcccagctgtataaggaaaagggctacgacattaatctgaaaaagctgaaagacaagggattcacaagcgtgaccaagctgtgcgccggaatcgacgaggaatgcaaggacgtcgaaaaggaaatgaccgagcgggccaaggcctctttcgctgccctggaaaccgccaaccccaagctgtacgccacatacatcaactactctgatgaagagaagaatgccgaactgagaaagcagatcaatagagagaaggccaaaaccgccctgaacgctcatctgcgcaacaccaagtggaacgtgatcatccgggaagatcttctgagaagagataacaaggcttgtaaaatcttcagaaataaggtcgcccacctggaggccatccgatacgctcacctgtacatcaacgacatcgctgaggtgaatagctattttcagttttaccactacatcatgcagcggaggatcatggccgaacggtacgacaagagcagcggcaaggttagagaatacttcgacgccgtgaacaatgagaaaaaatacaacgatagactgctgaagctcctctgtgtgccattcggctactgcatccctagattcaagaatctgagcatcgaggccctgttcgacatgaacgaggccgtgaagtttgataaggaaaagaagggatcccccaaaaaaaaaaggaaggtgtaaggatcctctagataactgatcataatcagccataccacatttgtagaggttttacttgctttaaaaaacctcccacacctccccctgaacctgaaacataaaatgaatgcaattgttgttgttaacttgtttattgcagcttataatggttacaaataaagcaatagcatcacaaatttcacaaataaagcatttttttcactgcattctagttgtggtttgtccaaactcatcaatgtatctta

SEQ ID NO: 529 - DNA, 12 bp, Artificial Sequence
  Kozak sequence
gccgccaccatg

SEQ ID NO: 530 - DNA, 2817 bp, Artificial Sequence
  Cas13d seq198
atcgaaaagaagaagagctacgctaaaggaatgggcctgaaaagcaccatcgtgtccggctctaaagtgtacatgacaaccttcggcgatggcagcgaggccagactggagaaggtggttgagaacgatagcatcaagaccctgcacgagggcgaggccttcagcgctgagatgaccgacaacaacgccggctataagatcggaaacgtgaagttctcccaccctaacggctacgacgtggtcgccaacaaccctttctacaccggccctgtgcagcaggacatgctgggcctgaaagaaatcctggaaagacggtactttggatctagcacagacggtaacaataccatctgcatccaaatcatccacaatatcctggatatcgaaaaaattctggcagagtacatcacaaacgcagtgtacgccaccaacaacatcatcgatcctgataacgacgtgatcggcggcaagaagttcaccagcattaaaaccttcgcccagttctccgccagcgacagcagcaacgatttcgagcagttcctgaaaaatcccagactcggctacctgggcaaagcctttttctacaaggacggcaagcggaacaacagacagaaggatcctatcgagtgttaccacctgctggccctgctgtgcggcctgcgtaattgggttgtgcacaacaacgaggaaaaggacctgatcaagtacacctggttgtataacctggacaagtacctggatgccgagtacatcaccaccctgaactacatgtacaacgacatcggcgacgagttgacggactctttctccaagaacagcgccgccaatatcaactacatcgccgagaccctgggaatcgaccccaagaccttcgccgagcaatacttccggttctctatcatgaaggaacagaaaaacctgggattcaacctgaccaagctgagagaggtgatgctggaccggaaggacatgagcgagatcagagagaaccacaacgacttcgattctatcagagccaaggtgtacacaatgatggacttcgtgatctatcggtactacatcgaagaggccgctaaggtgaacgccgccaacaagagcctgcccgacaacgagaagagcctgagcgagaaagacatcttcgtgatttcactcagaggcagcttcaacgaagatcagaaggatcggctgtactacgacgaggcgcaaagactgtggtccaaggtgggcaaactgatgctgaaaatcaagaagttccggggcaaggacaccagaaagtacaagaatatgggcacacctagaatccggaggctgatccctgagggcagagatatcagcaccttctccaagctgatgtacgctctgactatgttcctggacggcaaggagatcaatgacctgctgaccacactgatcaacaaattcgacaacatccagagcttcttaaaggtgatgcctctgatcggcgtgaacgccaaatttgccgaagaatatagtttcttcaacaactctgaaaaaatcgccgacgaactgcggctgatcaagagctttgctagaatgggagaacccgtggctgacgccagaagagccatgtatatcgacgcaattcgcatcctgggcaccgatctctccgacgacgagctgaaggccctggctgattcttttagcctggacgagaacggcaataagctggggaagggcaagcacggcatgagaaacttcatcattaacaacgtgataacaaataagagattccactacctgatccggtacggcaacccagtccacctgcatgagatcgccaagaatgaagccgtggtcaagtttgtgctgggaagaatcgccgatatccagaagaaacagggccagaacggcaagaaccagatcgatagatactacgagacatgcatcggcaaggactcttctaaaagcgtggccgagaaggtgaacgccctgaccaagatcatcacaggcatgaactacgaccagttcgacagcagacggaacgtgatcgaaaacaccggcgccggcaacgccgagagagaaaagtacaagaagatcatcagcctgtacctgacagtgatctaccacatcctgaagaacattgttaatatcaactcaagatacgtgatcggatttcactgcgtggagagagatgcccagctgtataaggaaaagggctacgacattaatctgaaaaagctgaaagacaagggattcacaagcgtgaccaagctgtgcgccggaatcgacgaggaatgcaaggacgtcgaaaaggaaatgaccgagcgggccaaggcctctttcgctgccctggaaaccgccaaccccaagctgtacgccacatacatcaactactctgatgaagagaagaatgccgaactgagaaagcagatcaatagagagaaggccaaaaccgccctgaacgctcatctgcgcaacaccaagtggaacgtgatcatccgggaagatcttctgagaagagataacaaggcttgtaaaatcttcagaaataaggtcgcccacctggaggccatccgatacgctcacctgtacatcaacgacatcgctgaggtgaatagctattttcagttttaccactacatcatgcagcggaggatcatggccgaacggtacgacaagagcagcggcaaggttagagaatacttcgacgccgtgaacaatgagaaaaaatacaacgatagactgctgaagctcctctgtgtgccattcggctactgcatccctagattcaagaatctgagcatcgaggccctgttcgacatgaacgaggccgtgaagtttgataaggaaaagaag

SEQ ID NO: 531 - DNA, 6 bp, Artificial Sequence
  linker sequence
ggatcc

SEQ ID NO: 532 - DNA, 21 bp, Artificial Sequence
  SV40 NLS
cccaaaaaaaaaaggaaggtg

SEQ ID NO: 533 - DNA, 122 bp, Artificial Sequence
  SV40 polyA
aacttgtttattgcagcttataatggttacaaataaagcaatagcatcacaaatttcacaaataaagcatttttttcactgcattctagttgtggtttgtccaaactcatcaatgtatctta

SEQ ID NO: 534 - DNA, 3797 bp, Artificial Sequence
  Seq179-CTGguide3- whole nucleotide sequence from U6 promoter to SV-40 poly A
gagggcctatttcccatgattccttcatatttgcatatacgatacaaggctgttagagagataattagaattaatttgactgtaaacacaaagatattagtacaaaatacgtgacgtagaaagtaataatttcttgggtagtttgcagttttaaaattatgttttaaaatggactatcatatgcttaccgtaacttgaaagtatttcgatttcttggctttatatatcttgtggaaaggacgaaacaccgactatagccctgccggaaatgacagggttctacaacctgctgctgctgctgctgctgctgctttttttccaccacactggactagtggatccctgcagccctccttaggtcttgaaaggagtgggaattggctccggtgcccgtcagtgggcagagcgcacatcgcccacagtccccgagaagttggggggaggggtcggcaattgatccggtgcctagagaaggtggcgcggggtaaactgggaaagtgatgtcgtgtactggctccgcctttttcccgagggtgggggagaaccgtatataagtgcagtagtcgccgtgaacgttctttttcgcaacgggtttgccgccagaacacaggtcacgcttaactaacgcgtgccgccaccatggccaaaaagaagaaaaccgctcgccaactgagagaagaaatgcaacaacagcggaaacaggccattcagaagcaacaagaacagagacaagagaaagccgccgccgctcgcgagacagccgcccccgaacagcctgctgccgctcctgtgccaaagcggcaaagaaaatctctggccaaagccgccggactgaagtccaacttcatcttggacccacagagaagaacaacagtgatgacagcttttggccagggcagcaccgccatcctggagaagcagatcgtggacagagccatcagcgacctgcagccggttcagcagttccaagtggaacctgccagtgccgccaagtacaggctgaagaatagccgggtgagattccccaacgtgacagctgacgatcctctgtatagacggaaggatggcggcttcgtgcctggcatggacgccctcagaagaaagaacgtactggaacagagattcttcggcaagtctttcgccgataacatccacatccagatgatctacagcatcctggacatccacaagatcctcgctgccgcgagcggccacatcgtgcacctgctcaatatcgtgaatggctcaaaagatagagacttcatcggcatgctggccgcccacgtgctgtacaatgagctgaacgaggaggccaagcggagcatcgccgacttttgcaagagtcccagactgatctactactctgctgctttctacgagacattggacaacggcaagagcgagcgacggtctaacgaggacatcttcaacatcctggccctgatgacctgtctgagaaatttcagcagccaccacagcatcgccatcaaggtgaaggactacagcgccgctggcctgtacaacctgcggagactgggacctgacatgaagaaaatgctggacaccttctacaccgaggccttcatccagcttaaccagagcttccaggaccacaacaccacaaacctgacatgtctgttcgatatcctgaacatctctgatagcgccagacagaagcagctggctgaggaattttatagatacgtggtgttcaaggaacaaaagaacttgggattctccgtgcggaagctgagagaggaaatgctgctgctgccagacgctgccgtgatcgccgataagcggtacgacacctgcagatccaagctgtacaacctgatggacttcctgatcctgagagtgtacagaaccggcagagccgacagatgcgacaagctgcctgaggccctgcgggccgccctgaccgacgaggaaaaggccgtggtgtaccacaaagaagccctgagcctgtggaacgagatgagaaccctgatcctcgacggcctgctgcctcagatgacacctgagaacctgagcagactgtccggtcagaaaagaaagggcgaactgtctctggatgacgccatgctgaaagagtgcctgtacgagcccggacctgtgcccgaggatgctgcccctgaggaagccaacgccgagtacttctgccggatgatctacctggccaccctgtttatggatggcaaggagatcaacaccctgctgaccaccctgattagcaaattcgagaacatcgccgccttcctgcagaccatggaacagctgaacatcgaggccgagctgggccctgaatacgccatgtttaccagaagcagagccgtagccgagcagctgagagtgatcaacagcttcgccctgatgaagaagcctcaggtgaatgccaagcagcagctgtacagagccgctgtcaccctgctgggaacagaggaccctgacggcgtgaccgatgagatgctgtgcatcgaccccgtgaccggcaagatgctgcctcctaaccagaggcatcatggcgacaccggcttacggaacttcatcgcaaacaacgtggtggaaagccggagattccagtacttaatccggtacagcgatcctgctcagctgcaccagctcgccagcaacaagaagctggtcagattcgtgctgagcagcatccccgacacacagatcaacagatactatgaaacctgtggccagaccagactggccggcagagccgccaaggtggaattcctgacagacatgattgccgccatcagattcgaccagtttcgggatgtcaatcagaaagagcgcggcgccaatactcagaaagaaagatataaggccatgcttggcctgtaccagaccgtgctgtacctggctgttaaaaatctggtgaacattaacgccagatacgtgatggccttccactgcgtggagcgggatatgtttctgtatgacggcgagctgacagatcccaagggcgagagcgtgtctgctttcctggctgtgaatggaaagaagggcgtgcagcctcagtacctgctgctgacccagctgtttatccggcgggattaccttaagcggagtgcatgcgagcagatccagcacaacatggaaaacatctccgaccggctgctgcgggaataccggaacgccgtcgcccacctgaatgtgatagcccatctggctgactactctgccgacatgagagaaatcaccagctactacggcttgtatcactacctgatgcagagacacctcttcaaaagacacgcctggcagatcagacagcctgaaaggccaactgaggaggaacagaagctcatcgagcaggagcagaagcagctggcctgggagaaggccctgtttgacaagaccctgcagtaccacagctacaacaaggacctggtgaaggctcttaacgcccccttcggatacaacctggcaagatacaagaacctgtctatcgagcctctgttcagcaaagaagccgctcctgccgccgagatcaaggccacacacgccggatcccccaaaaaaaaaaggaaggtgtaaggatcctctagataactgatcataatcagccataccacatttgtagaggttttacttgctttaaaaaacctcccacacctccccctgaacctgaaacataaaatgaatgcaattgttgttgttaacttgtttattgcagcttataatggttacaaataaagcaatagcatcacaaatttcacaaataaagcatttttttcactgcattctagttgtggtttgtccaaactcatcaatgtatctta

SEQ ID NO: 535 - DNA, 2880 bp, Artificial Sequence
  Cas13 Seq179
gccaaaaagaagaaaaccgctcgccaactgagagaagaaatgcaacaacagcggaaacaggccattcagaagcaacaagaacagagacaagagaaagccgccgccgctcgcgagacagccgcccccgaacagcctgctgccgctcctgtgccaaagcggcaaagaaaatctctggccaaagccgccggactgaagtccaacttcatcttggacccacagagaagaacaacagtgatgacagcttttggccagggcagcaccgccatcctggagaagcagatcgtggacagagccatcagcgacctgcagccggttcagcagttccaagtggaacctgccagtgccgccaagtacaggctgaagaatagccgggtgagattccccaacgtgacagctgacgatcctctgtatagacggaaggatggcggcttcgtgcctggcatggacgccctcagaagaaagaacgtactggaacagagattcttcggcaagtctttcgccgataacatccacatccagatgatctacagcatcctggacatccacaagatcctcgctgccgcgagcggccacatcgtgcacctgctcaatatcgtgaatggctcaaaagatagagacttcatcggcatgctggccgcccacgtgctgtacaatgagctgaacgaggaggccaagcggagcatcgccgacttttgcaagagtcccagactgatctactactctgctgctttctacgagacattggacaacggcaagagcgagcgacggtctaacgaggacatcttcaacatcctggccctgatgacctgtctgagaaatttcagcagccaccacagcatcgccatcaaggtgaaggactacagcgccgctggcctgtacaacctgcggagactgggacctgacatgaagaaaatgctggacaccttctacaccgaggccttcatccagcttaaccagagcttccaggaccacaacaccacaaacctgacatgtctgttcgatatcctgaacatctctgatagcgccagacagaagcagctggctgaggaattttatagatacgtggtgttcaaggaacaaaagaacttgggattctccgtgcggaagctgagagaggaaatgctgctgctgccagacgctgccgtgatcgccgataagcggtacgacacctgcagatccaagctgtacaacctgatggacttcctgatcctgagagtgtacagaaccggcagagccgacagatgcgacaagctgcctgaggccctgcgggccgccctgaccgacgaggaaaaggccgtggtgtaccacaaagaagccctgagcctgtggaacgagatgagaaccctgatcctcgacggcctgctgcctcagatgacacctgagaacctgagcagactgtccggtcagaaaagaaagggcgaactgtctctggatgacgccatgctgaaagagtgcctgtacgagcccggacctgtgcccgaggatgctgcccctgaggaagccaacgccgagtacttctgccggatgatctacctggccaccctgtttatggatggcaaggagatcaacaccctgctgaccaccctgattagcaaattcgagaacatcgccgccttcctgcagaccatggaacagctgaacatcgaggccgagctgggccctgaatacgccatgtttaccagaagcagagccgtagccgagcagctgagagtgatcaacagcttcgccctgatgaagaagcctcaggtgaatgccaagcagcagctgtacagagccgctgtcaccctgctgggaacagaggaccctgacggcgtgaccgatgagatgctgtgcatcgaccccgtgaccggcaagatgctgcctcctaaccagaggcatcatggcgacaccggcttacggaacttcatcgcaaacaacgtggtggaaagccggagattccagtacttaatccggtacagcgatcctgctcagctgcaccagctcgccagcaacaagaagctggtcagattcgtgctgagcagcatccccgacacacagatcaacagatactatgaaacctgtggccagaccagactggccggcagagccgccaaggtggaattcctgacagacatgattgccgccatcagattcgaccagtttcgggatgtcaatcagaaagagcgcggcgccaatactcagaaagaaagatataaggccatgcttggcctgtaccagaccgtgctgtacctggctgttaaaaatctggtgaacattaacgccagatacgtgatggccttccactgcgtggagcgggatatgtttctgtatgacggcgagctgacagatcccaagggcgagagcgtgtctgctttcctggctgtgaatggaaagaagggcgtgcagcctcagtacctgctgctgacccagctgtttatccggcgggattaccttaagcggagtgcatgcgagcagatccagcacaacatggaaaacatctccgaccggctgctgcgggaataccggaacgccgtcgcccacctgaatgtgatagcccatctggctgactactctgccgacatgagagaaatcaccagctactacggcttgtatcactacctgatgcagagacacctcttcaaaagacacgcctggcagatcagacagcctgaaaggccaactgaggaggaacagaagctcatcgagcaggagcagaagcagctggcctgggagaaggccctgtttgacaagaccctgcagtaccacagctacaacaaggacctggtgaaggctcttaacgcccccttcggatacaacctggcaagatacaagaacctgtctatcgagcctctgttcagcaaagaagccgctcctgccgccgagatcaaggccacacacgcc

SEQ ID NO: 536 - DNA, 3754 bp, Artificial Sequence
  Seq42-CTGguide3- whole nucleotide sequence from U6 promoter to SV-40 poly A
gagggcctatttcccatgattccttcatatttgcatatacgatacaaggctgttagagagataattagaattaatttgactgtaaacacaaagatattagtacaaaatacgtgacgtagaaagtaataatttcttgggtagtttgcagttttaaaattatgttttaaaatggactatcatatgcttaccgtaacttgaaagtatttcgatttcttggctttatatatcttgtggaaaggacgaaacaccgaccaacacctctgcaaaactgcaggggtctaaaacctgctgctgctgctgctgctgctgctttttttccaccacactggactagtctgcagccctccttaggtcttgaaaggagtgggaattggctccggtgcccgtcagtgggcagagcgcacatcgcccacagtccccgagaagttggggggaggggtcggcaattgatccggtgcctagagaaggtggcgcggggtaaactgggaaagtgatgtcgtgtactggctccgcctttttcccgagggtgggggagaaccgtatataagtgcagtagtcgccgtgaacgttctttttcgcaacgggtttgccgccagaacacaggtcacgcttaactaacgcgtgccgccaccatgaacaataagagaaagacaaaggccaaggccgctggactgaagagcgtcttttttgatcagaagcaagccgtgctgaccacattcgccaagggcaacaactcccagatcgagaagaaagtggtcaacagcgaggtcaaagatctgagacagcctcccgcctttgatctggaactgaaggagaagaccttctatatctccggcaagaacaacattaacacatctagggagaaccctctggctagcgcttctctgcctctctccaagaggcaaaggattagagccgagaggatcaagagagctagagaagaaaatagaccctaccataatgtcaagagggtgggagaggacgatctgagagccaaggctgacctcgagaaacactacttcggcaaggagtacagcgataatctgaaaattcagattatttataatatcctcgacatcaacaaaatcatcagcccctatatcaatgacatcgtctactccatgaacaatctggctagaaacgacgagtatatcgatggaaaaatcgacgtgatcggctccctctcctccaccacagactactcctccttcatgagccccaacaaggatctggaaaaggaaaaaaagttttccttccatagagaaaactacaaaaaattcgtcgaggccagcaagccctacatgaggtactatggaaaggtgtttattagagacgtgaagaaaagcaagctctccaccggaaagggcgagaagattgaggtgatgtatagatccgacgaggaaattttcaccatttttcaaattctgagctatgtgagacaatccatcatgcacaacgacatcggaaacaagagcagcattctggccatcgaaaagtaccccgccagattcgtcggctttctgagcgacctcctcaaaaccaagacaaacgatgtcaatagaatgttcattgacaataacagccaaacaaacttctgggtgctcttcagcatcttcggactgcaagatcacaccagcggagccgacaagatctgtagaaatttctacgacttcgtgatcaaggccgacagcaaaaacctcggattctccctcaagaagatcagagagctgatgctcgatctgcctaacgccaacatgctgagagatcaccaattcgataccgtgaggagcaagttttataccctcctcgacttcattatctatcaacactatctcgaggagaagtccagaatcgacaacatggtggagaagctgaggatgaccctcaaggaagaggaaaaggaagtgctctacgctgccgaggccaagattgtgtggaatgccatcggagccaaggtcatcaacaagctcgtgcccatgatgaatggcgatgctctgaaggagatcaagagaaaaaatagagatagaaagctccctcagagcgtgatcgccacagtgcaagtgaattccgacgccaatgtgttctccggactgatctactttctgacactgtttctcgacggcaaggagatcaacgagatggtgagcaacctcatcaccaagttcgagaacattgactctctgctgcatgtcgatagagaaatctacaagtccgacgagaaggatctggatctcgagatcgagaagctggccctctttttcaagggcgtggtgaggcctaatgccaagacagataccggcgccggagagatctccaagagcttctccatcttccagagcgccgaaaggattatcgaggaactgaagttcattaagaacgtcacaagaatggataacgagatcttccctagcgagggcgtgttcctcgatgccgctaacgtgctcggcgtcagaggcgatgactttgactttagcaatgagtttgtcggagacgatctgcacagcgacgctaataagaagattattaacaagatcaatggcaccaaggaggacagaaatctgaggaactttattattaataacgtcgtgaagagcagaaggtttcagtatatcgctagacacatgaatacacactacgtcaagcagctcgccaataacgagacactgaatagattcgtgctgaacaagatgggagacgccaagatcatcaataggtactacgagtccatctccggcaatacccccaatattgaggtcagaagccaaatcgactacctcgtcaagagactgaggagcttcagcttcgaagacctcaacgacgtcaagcaaaaggtgagacccggcaccaatgagagcatcgagaaggagaagaaaaaggccctcgtcggactgtgcctcacaattcagtacctcgtgtataaaaatctggtgaatatcaacgctaggtacaccaccgctttctactgtctggagagggactccaaactgaaaggctttggcgtggacgtgtggagagatttcgaatcctacaccgctctgaccaatcactttatcaaagaaggctatctgcccgtgagaaaggctgaaattctgagggccaatctgaagcatctggactgtgaagacggcttcaaatattacagaaaccaagtgacccacctcaacgccattagagtcgcctataaatatatcaacgagattaaatccgtgcacagctacttcgccctctaccactacatcatgcagagacatctgtacgacagcctccaagccaaagctaaggactcctccggcttcgtgatcgacgctctgaagaaatccttcgagcacaagatctacagcaaagatctgctccacgtgctgcactcccccttcggctataataccgctagatataaaaatctgagcatcgaggccctcttcgacaagaacgaatccagacccgaggtgaatcccctctccaccaatgatggatcccccaaaaaaaaaaggaaggtgtaaatccgatccaccggatctagataactgatcataatcagccataccacatttgtagaggttttacttgctttaaaaaacctcccacacctccccctgaacctgaaacataaaatgaatgcaattgttgttgttaacttgtttattgcagcttataatggttacaaataaagcaatagcatcacaaatttcacaaataaagcatttttttcactgcattctagttgtggtttgtccaaactcatcaatgtatctta

SEQ ID NO: 537 - DNA, 36 bp, Artificial Sequence
  Cas13d Seq42 direct repeat
gaccaacacctctgcaaaactgcaggggtctaaaac

SEQ ID NO: 538 - DNA, 2835 bp, Artificial Sequence
  Cas13d seq42
aacaataagagaaagacaaaggccaaggccgctggactgaagagcgtcttttttgatcagaagcaagccgtgctgaccacattcgccaagggcaacaactcccagatcgagaagaaagtggtcaacagcgaggtcaaagatctgagacagcctcccgcctttgatctggaactgaaggagaagaccttctatatctccggcaagaacaacattaacacatctagggagaaccctctggctagcgcttctctgcctctctccaagaggcaaaggattagagccgagaggatcaagagagctagagaagaaaatagaccctaccataatgtcaagagggtgggagaggacgatctgagagccaaggctgacctcgagaaacactacttcggcaaggagtacagcgataatctgaaaattcagattatttataatatcctcgacatcaacaaaatcatcagcccctatatcaatgacatcgtctactccatgaacaatctggctagaaacgacgagtatatcgatggaaaaatcgacgtgatcggctccctctcctccaccacagactactcctccttcatgagccccaacaaggatctggaaaaggaaaaaaagttttccttccatagagaaaactacaaaaaattcgtcgaggccagcaagccctacatgaggtactatggaaaggtgtttattagagacgtgaagaaaagcaagctctccaccggaaagggcgagaagattgaggtgatgtatagatccgacgaggaaattttcaccatttttcaaattctgagctatgtgagacaatccatcatgcacaacgacatcggaaacaagagcagcattctggccatcgaaaagtaccccgccagattcgtcggctttctgagcgacctcctcaaaaccaagacaaacgatgtcaatagaatgttcattgacaataacagccaaacaaacttctgggtgctcttcagcatcttcggactgcaagatcacaccagcggagccgacaagatctgtagaaatttctacgacttcgtgatcaaggccgacagcaaaaacctcggattctccctcaagaagatcagagagctgatgctcgatctgcctaacgccaacatgctgagagatcaccaattcgataccgtgaggagcaagttttataccctcctcgacttcattatctatcaacactatctcgaggagaagtccagaatcgacaacatggtggagaagctgaggatgaccctcaaggaagaggaaaaggaagtgctctacgctgccgaggccaagattgtgtggaatgccatcggagccaaggtcatcaacaagctcgtgcccatgatgaatggcgatgctctgaaggagatcaagagaaaaaatagagatagaaagctccctcagagcgtgatcgccacagtgcaagtgaattccgacgccaatgtgttctccggactgatctactttctgacactgtttctcgacggcaaggagatcaacgagatggtgagcaacctcatcaccaagttcgagaacattgactctctgctgcatgtcgatagagaaatctacaagtccgacgagaaggatctggatctcgagatcgagaagctggccctctttttcaagggcgtggtgaggcctaatgccaagacagataccggcgccggagagatctccaagagcttctccatcttccagagcgccgaaaggattatcgaggaactgaagttcattaagaacgtcacaagaatggataacgagatcttccctagcgagggcgtgttcctcgatgccgctaacgtgctcggcgtcagaggcgatgactttgactttagcaatgagtttgtcggagacgatctgcacagcgacgctaataagaagattattaacaagatcaatggcaccaaggaggacagaaatctgaggaactttattattaataacgtcgtgaagagcagaaggtttcagtatatcgctagacacatgaatacacactacgtcaagcagctcgccaataacgagacactgaatagattcgtgctgaacaagatgggagacgccaagatcatcaataggtactacgagtccatctccggcaatacccccaatattgaggtcagaagccaaatcgactacctcgtcaagagactgaggagcttcagcttcgaagacctcaacgacgtcaagcaaaaggtgagacccggcaccaatgagagcatcgagaaggagaagaaaaaggccctcgtcggactgtgcctcacaattcagtacctcgtgtataaaaatctggtgaatatcaacgctaggtacaccaccgctttctactgtctggagagggactccaaactgaaaggctttggcgtggacgtgtggagagatttcgaatcctacaccgctctgaccaatcactttatcaaagaaggctatctgcccgtgagaaaggctgaaattctgagggccaatctgaagcatctggactgtgaagacggcttcaaatattacagaaaccaagtgacccacctcaacgccattagagtcgcctataaatatatcaacgagattaaatccgtgcacagctacttcgccctctaccactacatcatgcagagacatctgtacgacagcctccaagccaaagctaaggactcctccggcttcgtgatcgacgctctgaagaaatccttcgagcacaagatctacagcaaagatctgctccacgtgctgcactcccccttcggctataataccgctagatataaaaatctgagcatcgaggccctcttcgacaagaacgaatccagacccgaggtgaatcccctctccaccaatgat

SEQ ID NO: 539 - DNA, 3976 bp, Artificial Sequence
  Seq212-CTGguide3- whole nucleotide sequence from U6 promoter to SV-40 poly A
gagggcctatttcccatgattccttcatatttgcatatacgatacaaggctgttagagagataattagaattaatttgactgtaaacacaaagatattagtacaaaatacgtgacgtagaaagtaataatttcttgggtagtttgcagttttaaaattatgttttaaaatggactatcatatgcttaccgtaacttgaaagtatttcgatttcttggctttatatatcttgtggaaaggacgaaacaccgtacaatagccctgcagtaaggcagggttctaagacctgctgctgctgctgctgctgctgctttttttccaccacactggactagtctgcagccctccttaggtcttgaaaggagtgggaattggctccggtgcccgtcagtgggcagagcgcacatcgcccacagtccccgagaagttggggggaggggtcggcaattgatccggtgcctagagaaggtggcgcggggtaaactgggaaagtgatgtcgtgtactggctccgcctttttcccgagggtgggggagaaccgtatataagtgcagtagtcgccgtgaacgttctttttcgcaacgggtttgccgccagaacacaggtcacgcttaactaacgcgtgccgccaccatgaagaagaagcaccagagcgccgccgagaagaggcaagtgaagaagctcaagaatcaagagaaggcccagaagtacgctagcgagccttcccccctccagagcgatacagctggcgtggaatgctcccagaaaaagacagtcgtcagccacattgccagctccaagacactggccaaggctatgggactcaaatccacactggtcatgggcgacaagctggtcatcaccagctttgctgctagcaaggctgtcggaggcgctggctacaaaagcgctaacattgaaaaaatcacagatctgcaaggaagggtcattgaggagcacgaaaggatgtttagcgccgatgtcggagagaaaaatatcgaactgagcaagaatgactgccacaccaacgtcaacaaccccgtggtgaccaacatcggaaaggattacatcggactgaaatctaggctggagcaagagtttttcggcaagacattcgagaatgacaatctgcatgtgcagctggcctacaatatcctcgacatcaagaaaattctgggaacctatgtgaacaatatcatttatatcttctacaatctgaatagggctggcaccggcagagatgagaggatgtatgacgacctcatcggcacactgtacgcttacaaacccatggaggctcaacagacctatctgctcaaaggcgacaaggatatgaggaggtttgaggaggtgaaacagctgctgcaaaacacctccgcttactatgtgtattacggcacactgttcgagaaggtgaaggctaagagcaagaaggaacagagggctaaggaggccgaaatcgacgcttgtaccgcccataactacgatgtgctgagactgctgtccctcatgaggcagctgtgcatgcactccgtcgctggaacagcctttaagctggctgagtccgctctgttcaacattgaggatgtgctcagcgccgatctgaaggaaatcctcgatgaagccttctccggcgccgtgaacaagctcaatgacggattcgtgcagcactccggcaacaatctgtacgtgctccagcagctgtaccctaatgagaccatcgagagaatcgccgagaagtactacagactcaccgtgaggaaggaggatctgaacatgggagtcaacattaaaaagctgagggagctgatcgtgggccaatactttcccgaggtcctcgacaaagaatacgacctctccaagaatggagacagcgtggtgacatacagaagcaagatttataccgtgatgaattacattctgctgtattacctcgaggaccacgactccagcagagaaagcatggtcgaagctctgagacaaaacagagagggcgatgaaggcaaggaggagatctatagacagtttgccaagaaggtgtggaacggcgtgtccggactgtttggcgtgtgtctgaacctcttcaagaccgaaaagagaaacaagtttaggagcaaagtcgccctccccgatgtgtccggcgctgcctatatgctctcctccgagaacatcgactactttgtcaagatgctcttctttgtgtgtaagtttctggatggcaaagaaatcaacgagctgctgtgcgctctgatcaacaaatttgataatattgccgatattctggatgctgccgctcaatgtggctcctccgtctggttcgtggacagctataggttcttcgagagatctaggaggattagcgcccagattagaatcgtgaagaacatcgcttccaaggattttaagaaatccaagaaggattccgatgagagctaccccgagcagctgtatctggatgctctggctctgctcggagacgtcatctccaagtacaagcagaatagagatggcagcgtcgtcatcgatgaccaaggcaatgccgtgctgacagagcaatacaagaggtttagatatgaatttttcgaggagatcaagagggacgaaagcggcggcatcaagtacaagaagtccggaaaacccgagtacaaccatcagagaaggaattttattctgaataatgtgctgaaaagcaaatggtttttctatgtggtgaagtacaataggcccagcagctgcagagaactgatgaagaataaggaaattctgaggttcgtgctgagagacatccccgactcccaagtgagaagatactttaaggccgtccaaggagaggaagcttacgctagcgccgaagctatgaggacaagactggtcgacgctctgtcccaatttagcgtcacagcttgtctggatgaagtgggcggcatgacagacaaggaattcgcctcccagagggccgtcgatagcaaagaaaaactgagagccatcatcagactgtatctgacagtcgcctatctgattaccaagagcatggtgaaggtgaatacaaggtttagcattgcctttagcgtgctggagagggactactatctgctcattgacggcaagaagaaatccagcgactacaccggagaggatatgctggctctgaccagaaaatttgtgggcgaagatgctggactgtatagagagtggaaagagaagaacgctgaagccaaggacaaatattttgacaaggccgaaaggaagaaggtgctgagacagaacgataagatgatcagaaagatgcacttcacaccccactccctcaattacgtccaaaagaatctcgaaagcgtccagagcaacggactggccgccgtcatcaaggaatatagaaatgccgtcgctcacctcaatatcatcaatagactggacgagtacattggctccgctagggctgatagctactactctctgtactgttactgcctccaaatgtatctgagcaagaacttcagcgtgggctacctcatcaacgtgcaaaagcagctggaggagcaccacacctacatgaaggatctcatgtggctgctcaacatccccttcgcttacaacctcgccagatacaaaaatctgtccaacgaaaaactcttttacgacgaggaagccgccgccgaaaaggctgacaaggctgagaacgagagaggcgaaggaagccccaagaagaaaaggaaggtctaaatccgatccaccggatctagataactgatcataatcagccataccacatttgtagaggttttacttgctttaaaaaacctcccacacctccccctgaacctgaaacataaaatgaatgcaattgttgttgttaacttgtttattgcagcttataatggttacaaataaagcaatagcatcacaaatttcacaaataaagcatttttttcactgcattctagttgtggtttgtccaaactcatcaatgtatctta

SEQ ID NO: 540 - DNA, 3057 bp, Artificial Sequence
  Cas13d seq212
aagaagaagcaccagagcgccgccgagaagaggcaagtgaagaagctcaagaatcaagagaaggcccagaagtacgctagcgagccttcccccctccagagcgatacagctggcgtggaatgctcccagaaaaagacagtcgtcagccacattgccagctccaagacactggccaaggctatgggactcaaatccacactggtcatgggcgacaagctggtcatcaccagctttgctgctagcaaggctgtcggaggcgctggctacaaaagcgctaacattgaaaaaatcacagatctgcaaggaagggtcattgaggagcacgaaaggatgtttagcgccgatgtcggagagaaaaatatcgaactgagcaagaatgactgccacaccaacgtcaacaaccccgtggtgaccaacatcggaaaggattacatcggactgaaatctaggctggagcaagagtttttcggcaagacattcgagaatgacaatctgcatgtgcagctggcctacaatatcctcgacatcaagaaaattctgggaacctatgtgaacaatatcatttatatcttctacaatctgaatagggctggcaccggcagagatgagaggatgtatgacgacctcatcggcacactgtacgcttacaaacccatggaggctcaacagacctatctgctcaaaggcgacaaggatatgaggaggtttgaggaggtgaaacagctgctgcaaaacacctccgcttactatgtgtattacggcacactgttcgagaaggtgaaggctaagagcaagaaggaacagagggctaaggaggccgaaatcgacgcttgtaccgcccataactacgatgtgctgagactgctgtccctcatgaggcagctgtgcatgcactccgtcgctggaacagcctttaagctggctgagtccgctctgttcaacattgaggatgtgctcagcgccgatctgaaggaaatcctcgatgaagccttctccggcgccgtgaacaagctcaatgacggattcgtgcagcactccggcaacaatctgtacgtgctccagcagctgtaccctaatgagaccatcgagagaatcgccgagaagtactacagactcaccgtgaggaaggaggatctgaacatgggagtcaacattaaaaagctgagggagctgatcgtgggccaatactttcccgaggtcctcgacaaagaatacgacctctccaagaatggagacagcgtggtgacatacagaagcaagatttataccgtgatgaattacattctgctgtattacctcgaggaccacgactccagcagagaaagcatggtcgaagctctgagacaaaacagagagggcgatgaaggcaaggaggagatctatagacagtttgccaagaaggtgtggaacggcgtgtccggactgtttggcgtgtgtctgaacctcttcaagaccgaaaagagaaacaagtttaggagcaaagtcgccctccccgatgtgtccggcgctgcctatatgctctcctccgagaacatcgactactttgtcaagatgctcttctttgtgtgtaagtttctggatggcaaagaaatcaacgagctgctgtgcgctctgatcaacaaatttgataatattgccgatattctggatgctgccgctcaatgtggctcctccgtctggttcgtggacagctataggttcttcgagagatctaggaggattagcgcccagattagaatcgtgaagaacatcgcttccaaggattttaagaaatccaagaaggattccgatgagagctaccccgagcagctgtatctggatgctctggctctgctcggagacgtcatctccaagtacaagcagaatagagatggcagcgtcgtcatcgatgaccaaggcaatgccgtgctgacagagcaatacaagaggtttagatatgaatttttcgaggagatcaagagggacgaaagcggcggcatcaagtacaagaagtccggaaaacccgagtacaaccatcagagaaggaattttattctgaataatgtgctgaaaagcaaatggtttttctatgtggtgaagtacaataggcccagcagctgcagagaactgatgaagaataaggaaattctgaggttcgtgctgagagacatccccgactcccaagtgagaagatactttaaggccgtccaaggagaggaagcttacgctagcgccgaagctatgaggacaagactggtcgacgctctgtcccaatttagcgtcacagcttgtctggatgaagtgggcggcatgacagacaaggaattcgcctcccagagggccgtcgatagcaaagaaaaactgagagccatcatcagactgtatctgacagtcgcctatctgattaccaagagcatggtgaaggtgaatacaaggtttagcattgcctttagcgtgctggagagggactactatctgctcattgacggcaagaagaaatccagcgactacaccggagaggatatgctggctctgaccagaaaatttgtgggcgaagatgctggactgtatagagagtggaaagagaagaacgctgaagccaaggacaaatattttgacaaggccgaaaggaagaaggtgctgagacagaacgataagatgatcagaaagatgcacttcacaccccactccctcaattacgtccaaaagaatctcgaaagcgtccagagcaacggactggccgccgtcatcaaggaatatagaaatgccgtcgctcacctcaatatcatcaatagactggacgagtacattggctccgctagggctgatagctactactctctgtactgttactgcctccaaatgtatctgagcaagaacttcagcgtgggctacctcatcaacgtgcaaaagcagctggaggagcaccacacctacatgaaggatctcatgtggctgctcaacatccccttcgcttacaacctcgccagatacaaaaatctgtccaacgaaaaactcttttacgacgaggaagccgccgccgaaaaggctgacaaggctgagaacgagagaggcgaa

SEQ ID NO: 541 - RNA, 7 nt, Artificial Sequence
  box c motif
rugauga

SEQ ID NO: 542 - RNA, 4 nt, Artificial Sequence
  box d motif
cuga

SEQ ID NO: 543 - protein, 21 aa, Homo sapiens
DRVLKRSAEGSNPPKPLKKLR

SEQ ID NO: 544 - protein, 10 aa, Homo sapiens
LPPLERLTLD

SEQ ID NO: 545 - protein, 10 aa, Homo sapiens
LALKLAGLDI

SEQ ID NO: 546 - DNA, 9 bp, Artificial Sequence
  kozak sequence
agaaccatg

SEQ ID NO: 547 - protein, 558 aa, Artificial Sequence
  14Pumby targeting CUG frame 3
GRSRLLEDFRNNRYPNLQLREIAGHTEQLVQDQYGSYVIEHVLEHGRPEDKSKIVAEIRGHTEQLVQDQYGCYVIQHVLEHGRPEDKSKIVAEIRGHTEQLVQDQYGSYVIRHVLEHGRPEDKSKIVAEIRGHTEQLVQDQYGSYVIEHVLEHGRPEDKSKIVAEIRGHTEQLVQDQYGCYVIQHVLEHGRPEDKSKIVAEIRGHTEQLVQDQYGSYVIRHVLEHGRPEDKSKIVAEIRGHTEQLVQDQYGSYVIEHVLEHGRPEDKSKIVAEIRGHTEQLVQDQYGCYVIQHVLEHGRPEDKSKIVAEIRGHTEQLVQDQYGSYVIRHVLEHGRPEDKSKIVAEIRGHTEQLVQDQYGSYVIEHVLEHGRPEDKSKIVAEIRGHTEQLVQDQYGCYVIQHVLEHGRPEDKSKIVAEIRGHTEQLVQDQYGSYVIRHVLEHGRPEDKSKIVAEIRGHTEQLVQDQYGSYVIEHVLEHGRPEDKSKIVAEIRGHTEQLVQDQYGCYVIQHVLEHGRPEDKSKIVAEIRGHIATLRKYTYGKHILAKLEKYYMKNGVDLG

SEQ ID NO: 548 - protein, 558 aa, Artificial Sequence
  14Pumby targeting CUG frame 1
GRSRLLEDFRNNRYPNLQLREIAGHTEQLVQDQYGCYVIQHVLEHGRPEDKSKIVAEIRGHTEQLVQDQYGSYVIRHVLEHGRPEDKSKIVAEIRGHTEQLVQDQYGSYVIEHVLEHGRPEDKSKIVAEIRGHTEQLVQDQYGCYVIQHVLEHGRPEDKSKIVAEIRGHTEQLVQDQYGSYVIRHVLEHGRPEDKSKIVAEIRGHTEQLVQDQYGSYVIEHVLEHGRPEDKSKIVAEIRGHTEQLVQDQYGCYVIQHVLEHGRPEDKSKIVAEIRGHTEQLVQDQYGSYVIRHVLEHGRPEDKSKIVAEIRGHTEQLVQDQYGSYVIEHVLEHGRPEDKSKIVAEIRGHTEQLVQDQYGCYVIQHVLEHGRPEDKSKIVAEIRGHTEQLVQDQYGSYVIRHVLEHGRPEDKSKIVAEIRGHTEQLVQDQYGSYVIEHVLEHGRPEDKSKIVAEIRGHTEQLVQDQYGCYVIQHVLEHGRPEDKSKIVAEIRGHTEQLVQDQYGSYVIRHVLEHGRPEDKSKIVAEIRGHIATLRKYTYGKHILAKLEKYYMKNGVDLG

SEQ ID NO: 549 - protein, 349 aa, Artificial Sequence
  8PUF - frame 2 R4 Y13
GRSRLLEDFRNNRYPNLQLREIAGHIMEFSQDQHGSRFIRLKLERATPAERQLVFNEILQAAYQLMVDVFGSYVIEKFFEFGSLEQKLALAERIRGHVLSLALQMYGCRVIQKALEFIPSDQQNEMVRELDGHVLKCVKDQNGSYVVRKCIECVQPQSLQFIIDAFKGQVFALSTHPYGSRVIERILEHCLPDQTLPILEELHQHTEQLVQDQYGCYVIQHVLEHGRPEDKSKIVAEIRGNVLVLSQHKFASYVVRKCVTHASRTERAVLIDEVCTMNDGPHSALYTMMKDQYASYVVEKMIDVAEPGQRKIVMHKIRPHIATLRKYTYGKHILAKLEKYYMKNGVDLG

SEQ ID NO: 550 - protein, 349 aa, Artificial Sequence; identical to SEQ ID NO: 549
  14PUF - frame 2

SEQ ID NO: 551 - protein, 565 aa, Artificial Sequence
  14PUF - frame 2
GRSRLLEDFRNNRYPNLQLREIAGHIMEFSQDQHGSRFIRLKLERATPAERQLVFNEILQAAYQLMVDVFGSYVIEKFFEFGSLEQKLALAERIRGHVLSLALQMYGCRVIQKALEFIPSDQQNEMVRELDGHVLKCVKDQNGSHVVRKCIECVQPQSLQFIIDAFKGQVFALSTHPYGSRVIERILEHCLPDQTLPILEELHQHTEQLVQDQYGCYVIQHVLEHGRPEDKSKIVAEIRGHIMEFSQDQHGSRFIRLKLERATPAERQLVFNEILQAAYQLMVDVFGSYVIEKFFEFGSLEQKLALAERIRGHVLSLALQMYGCRVIQKALEFIPSDQQNEMVRELDGHVLKCVKDQNGSHVVRKCIECVQPQSLQFIIDAFKGQVFALSTHPYGSRVIERILEHCLPDQTLPILEELHQHTEQLVQDQYGCYVIQHVLEHGRPEDKSKIVAEIRGNVLVLSQHKFASYVVRKCVTHASRTERAVLIDEVCTMNDGPHSALYTMMKDQYASYVVEKMIDVAEPGQRKIVMHKIRPHIATLRKYTYGKHILAKLEKYYMKNGVDLG

SEQ ID NO: 552 - protein, 608 aa, Artificial Sequence
  15PUF - frame 2
GRSRLLEDFRNNRYPNLQLREIAGHIMEFSQDQHGSRFIQLKLERATPAERQLVFNEILQAAYQLMVDVFGSYVIRKFFEFGSLEQKLALAERIRGHVLSLALQMYGSRVIEKALEFIPSDQQNEMVRELDGHVLKCVKDQNGCHVVQKCIECVQPQSLQFIIDAFKGQVFALSTHPYGSRVIRRILEHCLPDQTLPILEELHQHIMEFSQDQHGSRFIELKLERATPAERQLVFNEILQAAYQLMVDVFGCYVIQKFFEFGSLEQKLALAERIRGHVLSLALQMYGSYVIRKALEFIPSDQQNEMVRELDGHVLKCVKDQNGSYVVEKCIECVQPQSLQFIIDAFKGQVFALSTHPYGCRVIQRILEHCLPDQTLPILEELHQHTEQLVQDQYGSYVIRHVLEHGRPEDKSKIVAEIRGNVLVLSQHKFASNVVEKCVTHASRTERAVLIDEVCTMNDGPHSHTEQLVQDQYGCYVIQHVLEHGRPEDKSKIVAEIRGNVLVLSQHKFASYVVRKCVTHASRTERAVLIDEVCTMNDGPHSALYTMMKDQYASYVVEKMIDVAEPGQRKIVMHKIRPHIATLRKYTYGKHILAKLEKYYMKNGVDLG

SEQ ID NO: 553 - protein, 608 aa, Artificial Sequence
  15PUF - frame 2
GRSRLLEDFRNNRYPNLQLREIAGHIMEFSQDQHGSRFIQLKLERATPAERQLVFNEILQAAYQLMVDVFGSYVIRKFFEFGSLEQKLALAERIRGHVLSLALQMYGSRVIEKALEFIPSDQQNEMVRELDGHVLKCVKDQNGCHVVQKCIECVQPQSLQFIIDAFKGQVFALSTHPYGSRVIRRILEHCLPDQTLPILEELHQHTEQLVQDQYGSYVIEHVLEHGRPEDKSKIVAEIRGHIMEFSQDQHGSRFIQLKLERATPAERQLVFNEILQAAYQLMVDVFGSYVIRKFFEFGSLEQKLALAERIRGHVLSLALQMYGSRVIEKALEFIPSDQQNEMVRELDGHVLKCVKDQNGCHVVQKCIECVQPQSLQFIIDAFKGQVFALSTHPYGSRVIRRILEHCLPDQTLPILEELHQHTEQLVQDQYGSYVIEHVLEHGRPEDKSKIVAEIRGNVLVLSQHKFACNVVQKCVTHASRTERAVLIDEVCTMNDGPHSNVLVLSQHKFASYVVRKCVTHASRTERAVLIDEVCTMNDGPHSALYTMMKDQYASYVVEKMIDVAEPGQRKIVMHKIRPHIATLRKYTYGKHILAKLEKYYMKNGVDLG

SEQ ID NO: 554 - protein, 608 aa, Artificial Sequence
  15PUF - frame 2
GRSRLLEDFRNNRYPNLQLREIAGHIMEFSQDQHGSRFIQLKLERATPAERQLVFNEILQAAYQLMVDVFGSYVIRKFFEFGSLEQKLALAERIRGHVLSLALQMYGSRVIEKALEFIPSDQQNEMVRELDGHVLKCVKDQNGCHVVQKCIECVQPQSLQFIIDAFKGQVFALSTHPYGSRVIRRILEHCLPDQTLPILEELHQHTEQLVQDQYGSYVIEHVLEHGRPEDKSKIVAEIRGNVLVLSQHKFACNVVQKCVTHASRTERAVLIDEVCTMNDGPHSHIMEFSQDQHGSRFIRLKLERATPAERQLVFNEILQAAYQLMVDVFGSYVIEKFFEFGSLEQKLALAERIRGHVLSLALQMYGCRVIQKALEFIPSDQQNEMVRELDGHVLKCVKDQNGSHVVRKCIECVQPQSLQFIIDAFKGQVFALSTHPYGSRVIERILEHCLPDQTLPILEELHQHTEQLVQDQYGCYVIQHVLEHGRPEDKSKIVAEIRGNVLVLSQHKFASYVVRKCVTHASRTERAVLIDEVCTMNDGPHSALYTMMKDQYASYVVEKMIDVAEPGQRKIVMHKIRPHIATLRKYTYGKHILAKLEKYYMKNGVDLG

SEQ ID NO: 555 - protein, 644 aa, Artificial Sequence
  16PUF - frame 2
GRSRLLEDFRNNRYPNLQLREIAGHIMEFSQDQHGSRFIELKLERATPAERQLVFNEILQAAYQLMVDVFGCYVIQKFFEFGSLEQKLALAERIRGHVLSLALQMYGSYVIRKALEFIPSDQQNEMVRELDGHVLKCVKDQNGSYVVEKCIECVQPQSLQFIIDAFKGQVFALSTHPYGCRVIQRILEHCLPDQTLPILEELHQHIMEFSQDQHGSRFIRLKLERATPAERQLVFNEILQAAYQLMVDVFGSYVIEKFFEFGSLEQKLALAERIRGHVLSLALQMYGCRVIQKALEFIPSDQQNEMVRELDGHVLKCVKDQNGSHVVRKCIECVQPQSLQFIIDAFKGQVFALSTHPYGSRVIERILEHCLPDQTLPILEELHQHTEQLVQDQYGCYVIQHVLEHGRPEDKSKIVAEIRGNVLVLSQHKFASYVVRKCVTHASRTERAVLIDEVCTMNDGPHSALYTMMKDQYASYVVEKMIDVAEPGQRKIVMHKIRPHTEQLVQDQYGCYVIQHVLEHGRPEDKSKIVAEIRGNVLVLSQHKFASYVVRKCVTHASRTERAVLIDEVCTMNDGPHSALYTMMKDQYASYVVEKMIDVAEPGQRKIVMHKIRPHIATLRKYTYGKHILAKLEKYYMKNGVDLG

SEQ ID NO: 556 - protein, 644 aa, Artificial Sequence
  16PUF - frame 2
GRSRLLEDFRNNRYPNLQLREIAGHIMEFSQDQHGSRFIELKLERATPAERQLVFNEILQAAYQLMVDVFGCYVIQKFFEFGSLEQKLALAERIRGHVLSLALQMYGSYVIRKALEFIPSDQQNEMVRELDGHVLKCVKDQNGSYVVEKCIECVQPQSLQFIIDAFKGQVFALSTHPYGCRVIQRILEHCLPDQTLPILEELHQHTEQLVQDQYGSYVIRHVLEHGRPEDKSKIVAEIRGHIMEFSQDQHGSRFIELKLERATPAERQLVFNEILQAAYQLMVDVFGCYVIQKFFEFGSLEQKLALAERIRGHVLSLALQMYGSYVIRKALEFIPSDQQNEMVRELDGHVLKCVKDQNGSYVVEKCIECVQPQSLQFIIDAFKGQVFALSTHPYGCRVIQRILEHCLPDQTLPILEELHQHTEQLVQDQYGSYVIRHVLEHGRPEDKSKIVAEIRGNVLVLSQHKFASNVVEKCVTHASRTERAVLIDEVCTMNDGPHSALYTMMKDQYACYVVQKMIDVAEPGQRKIVMHKIRPNVLVLSQHKFASYVVRKCVTHASRTERAVLIDEVCTMNDGPHSALYTMMKDQYASYVVEKMIDVAEPGQRKIVMHKIRPHIATLRKYTYGKHILAKLEKYYMKNGVDLG

SEQ ID NO: 557 - protein, 644 aa, Artificial Sequence
  16PUF - frame 2
GRSRLLEDFRNNRYPNLQLREIAGHIMEFSQDQHGSRFIELKLERATPAERQLVFNEILQAAYQLMVDVFGCYVIQKFFEFGSLEQKLALAERIRGHVLSLALQMYGSYVIRKALEFIPSDQQNEMVRELDGHVLKCVKDQNGSYVVEKCIECVQPQSLQFIIDAFKGQVFALSTHPYGCRVIQRILEHCLPDQTLPILEELHQHTEQLVQDQYGSYVIRHVLEHGRPEDKSKIVAEIRGNVLVLSQHKFASNVVEKCVTHASRTERAVLIDEVCTMNDGPHSALYTMMKDQYACYVVQKMIDVAEPGQRKIVMHKIRPHIMEFSQDQHGSRFIRLKLERATPAERQLVFNEILQAAYQLMVDVFGSYVIEKFFEFGSLEQKLALAERIRGHVLSLALQMYGCRVIQKALEFIPSDQQNEMVRELDGHVLKCVKDQNGSHVVRKCIECVQPQSLQFIIDAFKGQVFALSTHPYGSRVIERILEHCLPDQTLPILEELHQHTEQLVQDQYGCYVIQHVLEHGRPEDKSKIVAEIRGNVLVLSQHKFASYVVRKCVTHASRTERAVLIDEVCTMNDGPHSALYTMMKDQYASYVVEKMIDVAEPGQRKIVMHKIRPHIATLRKYTYGKHILAKLEKYYMKNGVDLG

SEQ ID NO: 558 - protein, 558 aa, Artificial Sequence
  14Pumby targeting CUG frame 2
GRSRLLEDFRNNRYPNLQLREIAGHTEQLVQDQYGSYVIRHVLEHGRPEDKSKIVAEIRGHTEQLVQDQYGSYVIEHVLEHGRPEDKSKIVAEIRGHTEQLVQDQYGCYVIQHVLEHGRPEDKSKIVAEIRGHTEQLVQDQYGSYVIRHVLEHGRPEDKSKIVAEIRGHTEQLVQDQYGSYVIEHVLEHGRPEDKSKIVAEIRGHTEQLVQDQYGCYVIQHVLEHGRPEDKSKIVAEIRGHTEQLVQDQYGSYVIRHVLEHGRPEDKSKIVAEIRGHTEQLVQDQYGSYVIEHVLEHGRPEDKSKIVAEIRGHTEQLVQDQYGCYVIQHVLEHGRPEDKSKIVAEIRGHTEQLVQDQYGSYVIRHVLEHGRPEDKSKIVAEIRGHTEQLVQDQYGSYVIEHVLEHGRPEDKSKIVAEIRGHTEQLVQDQYGCYVIQHVLEHGRPEDKSKIVAEIRGHTEQLVQDQYGSYVIRHVLEHGRPEDKSKIVAEIRGHTEQLVQDQYGSYVIEHVLEHGRPEDKSKIVAEIRGHIATLRKYTYGKHILAKLEKYYMKNGVDLG

SEQ ID NO: 559-567 - skipped (9 entries)

SEQ ID NO: 568 - protein, 349 aa, Artificial Sequence
  8PUF - frame 2 R4 H13
GRSRLLEDFRNNRYPNLQLREIAGHIMEFSQDQHGSRFIRLKLERATPAERQLVFNEILQAAYQLMVDVFGSYVIEKFFEFGSLEQKLALAERIRGHVLSLALQMYGCRVIQKALEFIPSDQQNEMVRELDGHVLKCVKDQNGSHVVRKCIECVQPQSLQFIIDAFKGQVFALSTHPYGSRVIERILEHCLPDQTLPILEELHQHTEQLVQDQYGCYVIQHVLEHGRPEDKSKIVAEIRGNVLVLSQHKFASYVVRKCVTHASRTERAVLIDEVCTMNDGPHSALYTMMKDQYASYVVEKMIDVAEPGQRKIVMHKIRPHIATLRKYTYGKHILAKLEKYYMKNGVDLG

SEQ ID NO: 569 - protein, 565 aa, Artificial Sequence
  14PUF - frame 2 R4 H13Y
GRSRLLEDFRNNRYPNLQLREIAGHIMEFSQDQHGSRFIRLKLERATPAERQLVFNEILQAAYQLMVDVFGSYVIEKFFEFGSLEQKLALAERIRGHVLSLALQMYGCRVIQKALEFIPSDQQNEMVRELDGHVLKCVKDQNGSYVVRKCIECVQPQSLQFIIDAFKGQVFALSTHPYGSRVIERILEHCLPDQTLPILEELHQHIMEFSQDQHGSRFIQLKLERATPAERQLVFNEILQAAYQLMVDVFGSYVIRKFFEFGSLEQKLALAERIRGHVLSLALQMYGSRVIEKALEFIPSDQQNEMVRELDGHVLKCVKDQNGCHVVQKCIECVQPQSLQFIIDAFKGQVFALSTHPYGSRVIRRILEHCLPDQTLPILEELHQHTEQLVQDQYGSYVIEHVLEHGRPEDKSKIVAEIRGHTEQLVQDQYGCYVIQHVLEHGRPEDKSKIVAEIRGNVLVLSQHKFASYVVRKCVTHASRTERAVLIDEVCTMNDGPHSALYTMMKDQYASYVVEKMIDVAEPGQRKIVMHKIRPHIATLRKYTYGKHILAKLEKYYMKNGVDLG

SEQ ID NO: 570 - protein, 565 aa, Artificial Sequence
  14PUF - frame 2 double H to Y mutation
GRSRLLEDFRNNRYPNLQLREIAGHIMEFSQDQHGSRFIRLKLERATPAERQLVFNEILQAAYQLMVDVFGSYVIEKFFEFGSLEQKLALAERIRGHVLSLALQMYGCRVIQKALEFIPSDQQNEMVRELDGHVLKCVKDQNGSYVVRKCIECVQPQSLQFIIDAFKGQVFALSTHPYGSRVIERILEHCLPDQTLPILEELHQHTEQLVQDQYGCYVIQHVLEHGRPEDKSKIVAEIRGHIMEFSQDQHGSRFIRLKLERATPAERQLVFNEILQAAYQLMVDVFGSYVIEKFFEFGSLEQKLALAERIRGHVLSLALQMYGCRVIQKALEFIPSDQQNEMVRELDGHVLKCVKDQNGSYVVRKCIECVQPQSLQFIIDAFKGQVFALSTHPYGSRVIERILEHCLPDQTLPILEELHQHTEQLVQDQYGCYVIQHVLEHGRPEDKSKIVAEIRGNVLVLSQHKFASYVVRKCVTHASRTERAVLIDEVCTMNDGPHSALYTMMKDQYASYVVEKMIDVAEPGQRKIVMHKIRPHIATLRKYTYGKHILAKLEKYYMKNGVDLG

SEQ ID NO: 571 - protein, 608 aa, Artificial Sequence
  15PUF - frame 2 H to Y mutation
GRSRLLEDFRNNRYPNLQLREIAGHIMEFSQDQHGSRFIQLKLERATPAERQLVFNEILQAAYQLMVDVFGSYVIRKFFEFGSLEQKLALAERIRGHVLSLALQMYGSRVIEKALEFIPSDQQNEMVRELDGHVLKCVKDQNGCHVVQKCIECVQPQSLQFIIDAFKGQVFALSTHPYGSRVIRRILEHCLPDQTLPILEELHQHTEQLVQDQYGSYVIEHVLEHGRPEDKSKIVAEIRGNVLVLSQHKFACNVVQKCVTHASRTERAVLIDEVCTMNDGPHSHIMEFSQDQHGSRFIRLKLERATPAERQLVFNEILQAAYQLMVDVFGSYVIEKFFEFGSLEQKLALAERIRGHVLSLALQMYGCRVIQKALEFIPSDQQNEMVRELDGHVLKCVKDQNGSYVVRKCIECVQPQSLQFIIDAFKGQVFALSTHPYGSRVIERILEHCLPDQTLPILEELHQHTEQLVQDQYGCYVIQHVLEHGRPEDKSKIVAEIRGNVLVLSQHKFASYVVRKCVTHASRTERAVLIDEVCTMNDGPHSALYTMMKDQYASYVVEKMIDVAEPGQRKIVMHKIRPHIATLRKYTYGKHILAKLEKYYMKNGVDLG

SEQ ID NO: 572 - protein, 644 aa, Artificial Sequence
  16PUF - frame 2 H to Y mutation
GRSRLLEDFRNNRYPNLQLREIAGHIMEFSQDQHGSRFIELKLERATPAERQLVFNEILQAAYQLMVDVFGCYVIQKFFEFGSLEQKLALAERIRGHVLSLALQMYGSYVIRKALEFIPSDQQNEMVRELDGHVLKCVKDQNGSYVVEKCIECVQPQSLQFIIDAFKGQVFALSTHPYGCRVIQRILEHCLPDQTLPILEELHQHIMEFSQDQHGSRFIRLKLERATPAERQLVFNEILQAAYQLMVDVFGSYVIEKFFEFGSLEQKLALAERIRGHVLSLALQMYGCRVIQKALEFIPSDQQNEMVRELDGHVLKCVKDQNGSYVVRKCIECVQPQSLQFIIDAFKGQVFALSTHPYGSRVIERILEHCLPDQTLPILEELHQHTEQLVQDQYGCYVIQHVLEHGRPEDKSKIVAEIRGNVLVLSQHKFASYVVRKCVTHASRTERAVLIDEVCTMNDGPHSALYTMMKDQYASYVVEKMIDVAEPGQRKIVMHKIRPHTEQLVQDQYGCYVIQHVLEHGRPEDKSKIVAEIRGNVLVLSQHKFASYVVRKCVTHASRTERAVLIDEVCTMNDGPHSALYTMMKDQYASYVVEKMIDVAEPGQRKIVMHKIRPHIATLRKYTYGKHILAKLEKYYMKNGVDLG

SEQ ID NO: 573 - protein, 644 aa, Artificial Sequence
  16PUF - frame 2 H to Y mutation
GRSRLLEDFRNNRYPNLQLREIAGHIMEFSQDQHGSRFIELKLERATPAERQLVFNEILQAAYQLMVDVFGCYVIQKFFEFGSLEQKLALAERIRGHVLSLALQMYGSYVIRKALEFIPSDQQNEMVRELDGHVLKCVKDQNGSYVVEKCIECVQPQSLQFIIDAFKGQVFALSTHPYGCRVIQRILEHCLPDQTLPILEELHQHTEQLVQDQYGSYVIRHVLEHGRPEDKSKIVAEIRGNVLVLSQHKFASNVVEKCVTHASRTERAVLIDEVCTMNDGPHSALYTMMKDQYACYVVQKMIDVAEPGQRKIVMHKIRPHIMEFSQDQHGSRFIRLKLERATPAERQLVFNEILQAAYQLMVDVFGSYVIEKFFEFGSLEQKLALAERIRGHVLSLALQMYGCRVIQKALEFIPSDQQNEMVRELDGHVLKCVKDQNGSYVVRKCIECVQPQSLQFIIDAFKGQVFALSTHPYGSRVIERILEHCLPDQTLPILEELHQHTEQLVQDQYGCYVIQHVLEHGRPEDKSKIVAEIRGNVLVLSQHKFASYVVRKCVTHASRTERAVLIDEVCTMNDGPHSALYTMMKDQYASYVVEKMIDVAEPGQRKIVMHKIRPHIATLRKYTYGKHILAKLEKYYMKNGVDLG

SEQ ID NO: 574 - DNA, 1767 bp, Artificial Sequence
  PUF8 CAG - frame 2 R4 13Y  Nucleotide Sequence (whole insert including Flag tag, H2B NLS, PUF, E17 fu sion, and PKI NES)
gactataaagatgacgatgataaaggaaaaaaaagaaaaagatcgagaaaaggatcgatagtagcggtctcccgaggcatgggccgcagccgccttttggaagattttcgaaacaaccggtaccccaatttacaactgcgggagattgccggacatataatggaattttcccaagaccagcatgggtccagattcattcgcctgaaactggagcgtgccacaccagctgagcgccagcttgtcttcaatgaaatcctccaggctgcctaccaactcatggtggatgtgtttggtagttacgtcattgaaaagttctttgaatttggcagtcttgaacagaagctggctttggcagaacggattcgaggtcacgtcctgtcattggcactacagatgtatggctgtcgtgttatccagaaagctcttgagtttattccttcagaccagcagaatgagatggttcgggaactagatggccatgtcttgaagtgtgtgaaagatcagaatggcagttacgtggttcgcaaatgcattgaatgtgtacagccccagtctttgcaatttatcatcgatgcgtttaagggacaggtatttgccttatccacacatccttatggctcccgagtgattgagagaatcctggagcactgtctccctgaccagacactccctattttagaggagcttcaccagcacacagagcagcttgtacaggatcaatatggatgttatgtaatccagcatgtactggagcacggtcgtcctgaggataaaagcaaaattgtagcagaaatccgaggcaatgtacttgtattgagtcagcacaaatttgcaagctatgttgtgcgcaagtgtgttactcacgcctcacgtacggagcgcgctgtgctcatcgatgaggtgtgcaccatgaacgacggtccccacagtgccttatacaccatgatgaaggaccagtatgccagctacgtggtcgagaagatgattgacgtggcggagccaggccagcggaagatcgtcatgcataagatccgaccccacatcgcaactcttcgtaagtacacctatggcaagcacattctggccaagctggagaagtactacatgaagaacggtgttgacttaggcggacgcagagaccggatggcagtggatactgccaatggcagcggtggtggcacccctaaggctcccaacctggagcctccactcccagaagaggaaaaggagggcagcgacctgagaccagtggtcatcgatgggagcaacgtggccatgagccatgggaacaaggaggtcttctcctgccggggcatcctgctggcagtgaactggtttctggagcggggccacacagacatcacagtgtttgtgccatcctggaggaaggagcagcctcggcccgacgtgcccatcacagaccagcacatcctgcgggaactggagaagaagaagatcctggtgttcacaccatcacgacgcgtgggtggcaagcgggtggtgtgctatgacgacagattcattgtgaagctggcctacgagtctgacgggatcgtggtttccaacgacacataccgtgacctccaaggcgagcggcaggagtggaagcgcttcatcgaggagcggctgctcatgtactccttcgtcaatgacaagtttatgccccctgatgacccactgggccggcacgggcccagcctggacaacttcctgcgtaagaagccactcactttggagttggctttgaaattggctggattggacatc

SEQ ID NO: 575 - DNA, 1743 bp, Artificial Sequence
  PUF8 CAG - frame 2 Nucleotide Sequence (no Tag, including H2B NLS, PUF, E17 fusion, and PKI NES)
ggaaaaaaaagaaaaagatcgagaaaaggatcgatagtagcggtctcccgaggcatgggccgcagccgccttttggaagattttcgaaacaaccggtaccccaatttacaactgcgggagattgccggacatataatggaattttcccaagaccagcatgggtccagattcattcgcctgaaactggagcgtgccacaccagctgagcgccagcttgtcttcaatgaaatcctccaggctgcctaccaactcatggtggatgtgtttggtagttacgtcattgaaaagttctttgaatttggcagtcttgaacagaagctggctttggcagaacggattcgaggtcacgtcctgtcattggcactacagatgtatggctgtcgtgttatccagaaagctcttgagtttattccttcagaccagcagaatgagatggttcgggaactagatggccatgtcttgaagtgtgtgaaagatcagaatggcagttacgtggttcgcaaatgcattgaatgtgtacagccccagtctttgcaatttatcatcgatgcgtttaagggacaggtatttgccttatccacacatccttatggctcccgagtgattgagagaatcctggagcactgtctccctgaccagacactccctattttagaggagcttcaccagcacacagagcagcttgtacaggatcaatatggatgttatgtaatccagcatgtactggagcacggtcgtcctgaggataaaagcaaaattgtagcagaaatccgaggcaatgtacttgtattgagtcagcacaaatttgcaagctatgttgtgcgcaagtgtgttactcacgcctcacgtacggagcgcgctgtgctcatcgatgaggtgtgcaccatgaacgacggtccccacagtgccttatacaccatgatgaaggaccagtatgccagctacgtggtcgagaagatgattgacgtggcggagccaggccagcggaagatcgtcatgcataagatccgaccccacatcgcaactcttcgtaagtacacctatggcaagcacattctggccaagctggagaagtactacatgaagaacggtgttgacttaggcggacgcagagaccggatggcagtggatactgccaatggcagcggtggtggcacccctaaggctcccaacctggagcctccactcccagaagaggaaaaggagggcagcgacctgagaccagtggtcatcgatgggagcaacgtggccatgagccatgggaacaaggaggtcttctcctgccggggcatcctgctggcagtgaactggtttctggagcggggccacacagacatcacagtgtttgtgccatcctggaggaaggagcagcctcggcccgacgtgcccatcacagaccagcacatcctgcgggaactggagaagaagaagatcctggtgttcacaccatcacgacgcgtgggtggcaagcgggtggtgtgctatgacgacagattcattgtgaagctggcctacgagtctgacgggatcgtggtttccaacgacacataccgtgacctccaaggcgagcggcaggagtggaagcgcttcatcgaggagcggctgctcatgtactccttcgtcaatgacaagtttatgccccctgatgacccactgggccggcacgggcccagcctggacaacttcctgcgtaagaagccactcactttggagttggctttgaaattggctggattggacatc

SEQ ID NO: 576 - DNA, 1047 bp, Artificial Sequence; identical to SEQ ID NO: 452
  PUF8 CAG - frame 2 Nucleotide Sequence R4 H13Y

SEQ ID NO: 577 - DNA, 1713 bp, Artificial Sequence
  PUF8 CAG - frame 2 R4 13Y Nucleotide Sequence (including H2B NLS, PUF and E17 fusion)
ggaaaaaaaagaaaaagatcgagaaaaggatcgatagtagcggtctcccgaggcatgggccgcagccgccttttggaagattttcgaaacaaccggtaccccaatttacaactgcgggagattgccggacatataatggaattttcccaagaccagcatgggtccagattcattcgcctgaaactggagcgtgccacaccagctgagcgccagcttgtcttcaatgaaatcctccaggctgcctaccaactcatggtggatgtgtttggtagttacgtcattgaaaagttctttgaatttggcagtcttgaacagaagctggctttggcagaacggattcgaggtcacgtcctgtcattggcactacagatgtatggctgtcgtgttatccagaaagctcttgagtttattccttcagaccagcagaatgagatggttcgggaactagatggccatgtcttgaagtgtgtgaaagatcagaatggcagttacgtggttcgcaaatgcattgaatgtgtacagccccagtctttgcaatttatcatcgatgcgtttaagggacaggtatttgccttatccacacatccttatggctcccgagtgattgagagaatcctggagcactgtctccctgaccagacactccctattttagaggagcttcaccagcacacagagcagcttgtacaggatcaatatggatgttatgtaatccagcatgtactggagcacggtcgtcctgaggataaaagcaaaattgtagcagaaatccgaggcaatgtacttgtattgagtcagcacaaatttgcaagctatgttgtgcgcaagtgtgttactcacgcctcacgtacggagcgcgctgtgctcatcgatgaggtgtgcaccatgaacgacggtccccacagtgccttatacaccatgatgaaggaccagtatgccagctacgtggtcgagaagatgattgacgtggcggagccaggccagcggaagatcgtcatgcataagatccgaccccacatcgcaactcttcgtaagtacacctatggcaagcacattctggccaagctggagaagtactacatgaagaacggtgttgacttaggcggacgcagagaccggatggcagtggatactgccaatggcagcggtggtggcacccctaaggctcccaacctggagcctccactcccagaagaggaaaaggagggcagcgacctgagaccagtggtcatcgatgggagcaacgtggccatgagccatgggaacaaggaggtcttctcctgccggggcatcctgctggcagtgaactggtttctggagcggggccacacagacatcacagtgtttgtgccatcctggaggaaggagcagcctcggcccgacgtgcccatcacagaccagcacatcctgcgggaactggagaagaagaagatcctggtgttcacaccatcacgacgcgtgggtggcaagcgggtggtgtgctatgacgacagattcattgtgaagctggcctacgagtctgacgggatcgtggtttccaacgacacataccgtgacctccaaggcgagcggcaggagtggaagcgcttcatcgaggagcggctgctcatgtactccttcgtcaatgacaagtttatgccccctgatgacccactgggccggcacgggcccagcctggacaacttcctgcgtaagaagccactcactttggag

SEQ ID NO: 578 - DNA, 1737 bp, Artificial Sequence; identical to SEQ ID NO: 515
  PUF8 CAG - frame 2 R4 13Y Nucleotide Sequence (whole insert including Flag tag, H2B NLS, PUF and E17 fusion)

SEQ ID NO: 579 - DNA, 1713 bp, Artificial Sequence; identical to SEQ ID NO: 577
  PUF8 CAG - frame 2 R4 13Y Nucleotide Sequence (whole insert including H2B NLS, PUF, E17 fusion):

SEQ ID NO: 580 - DNA, 1752 bp, Artificial Sequence
  PUF8 CAG Nucleotide Sequence (whole insert including RB NLS, PUF, E17 fusion)
gaccgtgtgctcaaaagaagtgctgaaggaagcaaccctcctaaaccactgaaaaaactacgcggaggatcgatagtagcggtctcccgaggcatgggccgcagccgccttttggaagattttcgaaacaaccggtaccccaatttacaactgcgggagattgccggacatataatggaattttcccaagaccagcatgggtccagattcattcgcctgaaactggagcgtgccacaccagctgagcgccagcttgtcttcaatgaaatcctccaggctgcctaccaactcatggtggatgtgtttggtagttacgtcattgaaaagttctttgaatttggcagtcttgaacagaagctggctttggcagaacggattcgaggtcacgtcctgtcattggcactacagatgtatggctgtcgtgttatccagaaagctcttgagtttattccttcagaccagcagaatgagatggttcgggaactagatggccatgtcttgaagtgtgtgaaagatcagaatggcagttacgtggttcgcaaatgcattgaatgtgtacagccccagtctttgcaatttatcatcgatgcgtttaagggacaggtatttgccttatccacacatccttatggctcccgagtgattgagagaatcctggagcactgtctccctgaccagacactccctattttagaggagcttcaccagcacacagagcagcttgtacaggatcaatatggatgttatgtaatccagcatgtactggagcacggtcgtcctgaggataaaagcaaaattgtagcagaaatccgaggcaatgtacttgtattgagtcagcacaaatttgcaagctatgttgtgcgcaagtgtgttactcacgcctcacgtacggagcgcgctgtgctcatcgatgaggtgtgcaccatgaacgacggtccccacagtgccttatacaccatgatgaaggaccagtatgccagctacgtggtcgagaagatgattgacgtggcggagccaggccagcggaagatcgtcatgcataagatccgaccccacatcgcaactcttcgtaagtacacctatggcaagcacattctggccaagctggagaagtactacatgaagaacggtgttgacttaggcggacgcagagaccggatggcagtggatactgccaatggcagcggtggtggcacccctaaggctcccaacctggagcctccactcccagaagaggaaaaggagggcagcgacctgagaccagtggtcatcgatgggagcaacgtggccatgagccatgggaacaaggaggtcttctcctgccggggcatcctgctggcagtgaactggtttctggagcggggccacacagacatcacagtgtttgtgccatcctggaggaaggagcagcctcggcccgacgtgcccatcacagaccagcacatcctgcgggaactggagaagaagaagatcctggtgttcacaccatcacgacgcgtgggtggcaagcgggtggtgtgctatgacgacagattcattgtgaagctggcctacgagtctgacgggatcgtggtttccaacgacacataccgtgacctccaaggcgagcggcaggagtggaagcgcttcatcgaggagcggctgctcatgtactccttcgtcaatgacaagtttatgccccctgatgacccactgggccggcacgggcccagcctggacaacttcctgcgtaagaagccactcactttggag

SEQ ID NO: 581 - DNA, 1047 bp, Artificial Sequence
  8PUF - frame 2 R4 H13 nucleic acid sequence
ggccgcagccgccttttggaagattttcgaaacaaccggtaccccaatttacaactgcgggagattgccggacatataatggaattttcccaagaccagcatgggtccagattcattcgcctgaaactggagcgtgccacaccagctgagcgccagcttgtcttcaatgaaatcctccaggctgcctaccaactcatggtggatgtgtttggtagttacgtcattgaaaagttctttgaatttggcagtcttgaacagaagctggctttggcagaacggattcgaggtcacgtcctgtcattggcactacagatgtatggctgtcgtgttatccagaaagctcttgagtttattccttcagaccagcagaatgagatggttcgggaactagatggccatgtcttgaagtgtgtgaaagatcagaatggcagtcacgtggttcgcaaatgcattgaatgtgtacagccccagtctttgcaatttatcatcgatgcgtttaagggacaggtatttgccttatccacacatccttatggctcccgagtgattgagagaatcctggagcactgtctccctgaccagacactccctattttagaggagcttcaccagcacacagagcagcttgtacaggatcaatatggatgttatgtaatccagcatgtactggagcacggtcgtcctgaggataaaagcaaaattgtagcagaaatccgaggcaatgtacttgtattgagtcagcacaaatttgcaagctatgttgtgcgcaagtgtgttactcacgcctcacgtacggagcgcgctgtgctcatcgatgaggtgtgcaccatgaacgacggtccccacagtgccttatacaccatgatgaaggaccagtatgccagctacgtggtcgagaagatgattgacgtggcggagccaggccagcggaagatcgtcatgcataagatccgaccccacatcgcaactcttcgtaagtacacctatggcaagcacattctggccaagctggagaagtactacatgaagaacggtgttgacttaggc

SEQ ID NO: 582 - DNA, 1707 bp, Artificial Sequence
  PUF8 CAG - frame 2 R4H13 Nucleotide Sequence (whole insert including RB NLS, PUF, E17 fusion):
gaccgtgtgctcaaaagaagtgctgaaggaagcaaccctcctaaaccactgaaaaaactacgcggaggatcgggccgcagccgccttttggaagattttcgaaacaaccggtaccccaatttacaactgcgggagattgccggacatataatggaattttcccaagaccagcatgggtccagattcattcgcctgaaactggagcgtgccacaccagctgagcgccagcttgtcttcaatgaaatcctccaggctgcctaccaactcatggtggatgtgtttggtagttacgtcattgaaaagttctttgaatttggcagtcttgaacagaagctggctttggcagaacggattcgaggtcacgtcctgtcattggcactacagatgtatggctgtcgtgttatccagaaagctcttgagtttattccttcagaccagcagaatgagatggttcgggaactagatggccatgtcttgaagtgtgtgaaagatcagaatggcagtcacgtggttcgcaaatgcattgaatgtgtacagccccagtctttgcaatttatcatcgatgcgtttaagggacaggtatttgccttatccacacatccttatggctcccgagtgattgagagaatcctggagcactgtctccctgaccagacactccctattttagaggagcttcaccagcacacagagcagcttgtacaggatcaatatggatgttatgtaatccagcatgtactggagcacggtcgtcctgaggataaaagcaaaattgtagcagaaatccgaggcaatgtacttgtattgagtcagcacaaatttgcaagctatgttgtgcgcaagtgtgttactcacgcctcacgtacggagcgcgctgtgctcatcgatgaggtgtgcaccatgaacgacggtccccacagtgccttatacaccatgatgaaggaccagtatgccagctacgtggtcgagaagatgattgacgtggcggagccaggccagcggaagatcgtcatgcataagatccgaccccacatcgcaactcttcgtaagtacacctatggcaagcacattctggccaagctggagaagtactacatgaagaacggtgttgacttaggcgtggatactgccaatggcagcggtggtggcacccctaaggctcccaacctggagcctccactcccagaagaggaaaaggagggcagcgacctgagaccagtggtcatcgatgggagcaacgtggccatgagccatgggaacaaggaggtcttctcctgccggggcatcctgctggcagtgaactggtttctggagcggggccacacagacatcacagtgtttgtgccatcctggaggaaggagcagcctcggcccgacgtgcccatcacagaccagcacatcctgcgggaactggagaagaagaagatcctggtgttcacaccatcacgacgcgtgggtggcaagcgggtggtgtgctatgacgacagattcattgtgaagctggcctacgagtctgacgggatcgtggtttccaacgacacataccgtgacctccaaggcgagcggcaggagtggaagcgcttcatcgaggagcggctgctcatgtactccttcgtcaatgacaagtttatgccccctgatgacccactgggccggcacgggcccagcctggacaacttcctgcgtaagaagccactcactttggag

SEQ ID NO: 583 - skipped

SEQ ID NO: 584 - DNA, 20 bp, Artificial Sequence
  CAG forward PCR primer
caaagaccacgacggagatt

SEQ ID NO: 585 - DNA, 20 bp, Artificial Sequence
  CAG reverse PCR primer
tcagcttctgctccagatcc

SEQ ID NO: 586 - protein, 9 aa, Artificial Sequence
  HA Tag
YPYDVPDYA

SEQ ID NO: 587 - protein, 1019 aa, Artificial Sequence
  dCas13d seq 212 1 point mutation (H919A)
KKKHQSAAEKRQVKKLKNQEKAQKYASEPSPLQSDTAGVECSQKKTVVSHIASSKTLAKAMGLKSTLVMGDKLVITSFAASKAVGGAGYKSANIEKITDLQGRVIEEHERMFSADVGEKNIELSKNDCHTNVNNPVVTNIGKDYIGLKSRLEQEFFGKTFENDNLHVQLAYNILDIKKILGTYVNNIIYIFYNLNRAGTGRDERMYDDLIGTLYAYKPMEAQQTYLLKGDKDMRRFEEVKQLLQNTSAYYVYYGTLFEKVKAKSKKEQRAKEAEIDACTAHNYDVLRLLSLMRQLCMHSVAGTAFKLAESALFNIEDVLSADLKEILDEAFSGAVNKLNDGFVQHSGNNLYVLQQLYPNETIERIAEKYYRLTVRKEDLNMGVNIKKLRELIVGQYFPEVLDKEYDLSKNGDSVVTYRSKIYTVMNYILLYYLEDHDSSRESMVEALRQNREGDEGKEEIYRQFAKKVWNGVSGLFGVCLNLFKTEKRNKFRSKVALPDVSGAAYMLSSENIDYFVKMLFFVCKFLDGKEINELLCALINKFDNIADILDAAAQCGSSVWFVDSYRFFERSRRISAQIRIVKNIASKDFKKSKKDSDESYPEQLYLDALALLGDVISKYKQNRDGSVVIDDQGNAVLTEQYKRFRYEFFEEIKRDESGGIKYKKSGKPEYNHQRRNFILNNVLKSKWFFYVVKYNRPSSCRELMKNKEILRFVLRDIPDSQVRRYFKAVQGEEAYASAEAMRTRLVDALSQFSVTACLDEVGGMTDKEFASQRAVDSKEKLRAIIRLYLTVAYLITKSMVKVNTRFSIAFSVLERDYYLLIDGKKKSSDYTGEDMLALTRKFVGEDAGLYREWKEKNAEAKDKYFDKAERKKVLRQNDKMIRKMHFTPHSLNYVQKNLESVQSNGLAAVIKEYRNAVAALNIINRLDEYIGSARADSYYSLYCYCLQMYLSKNFSVGYLINVQKQLEEHHTYMKDLMWLLNIPFAYNLARYKNLSNEKLFYDEEAAAEKADKAENERGE

SEQ ID NO: 588 - DNA, 4463 bp, Artificial Sequence
  A01479: Nucleotide sequence whole transgene including ITRs
cctgcaggcagctgcgcgctcgctcgctcactgaggccgcccgggcgtcgggcgacctttggtcgcccggcctcagtgagcgagcgagcgcgcagagagggagtggccaactccatcactaggggttcctgcggccggtcgcgtctagtagagggcctatttcccatgattccttcatatttgcatatacgatacaaggctgttagagagataattggaattaatttgactgtaaacacaaagatattagtacaaaatacgtgacgtagaaagtaataatttcttgggtagtttgcagttttaaaattatgttttaaaatggactatcatatgcttaccgtaacttgaaagtatttcgatttcttggctttatatatcttgtggaaaggacgaaacaccgtagccctgcagtaaggcagggttctaagacctgctgctgctgctgctgctgctgctttttttgaattccaccacactggactagtggatcctaggtcttgaaaggagtgggaattggctccggtgcccgtcagtgggcagagcgcacatcgcccacagtccccgagaagttggggggaggggtcggcaattgatccggtgcctagagaaggtggcgcggggtaaactgggaaagtgatgtcgtgtactggctccgcctttttcccgagggtgggggagaaccgtatataagtgcagtagtcgccgtgaacgttctttttcgcaacgggtttgccgccagaacacaggtcacgcttaactaacgcgtgccgccaccatgaagaagaagcaccagagcgccgccgagaagaggcaagtgaagaagctcaagaatcaagagaaggcccagaagtacgctagcgagccttcccccctccagagcgatacagctggcgtggaatgctcccagaaaaagacagtcgtcagccacattgccagctccaagacactggccaaggctatgggactcaaatccacactggtcatgggcgacaagctggtcatcaccagctttgctgctagcaaggctgtcggaggcgctggctacaaaagcgctaacattgaaaaaatcacagatctgcaaggaagggtcattgaggagcacgaaaggatgtttagcgccgatgtcggagagaaaaatatcgaactgagcaagaatgactgccacaccaacgtcaacaaccccgtggtgaccaacatcggaaaggattacatcggactgaaatctaggctggagcaagagtttttcggcaagacattcgagaatgacaatctgcatgtgcagctggcctacaatatcctcgacatcaagaaaattctgggaacctatgtgaacaatatcatttatatcttctacaatctgaatagggctggcaccggcagagatgagaggatgtatgacgacctcatcggcacactgtacgcttacaaacccatggaggctcaacagacctatctgctcaaaggcgacaaggatatgaggaggtttgaggaggtgaaacagctgctgcaaaacacctccgcttactatgtgtattacggcacactgttcgagaaggtgaaggctaagagcaagaaggaacagagggctaaggaggccgaaatcgacgcttgtaccgcccataactacgatgtgctgagactgctgtccctcatgaggcagctgtgcatgcactccgtcgctggaacagcctttaagctggctgagtccgctctgttcaacattgaggatgtgctcagcgccgatctgaaggaaatcctcgatgaagccttctccggcgccgtgaacaagctcaatgacggattcgtgcagcactccggcaacaatctgtacgtgctccagcagctgtaccctaatgagaccatcgagagaatcgccgagaagtactacagactcaccgtgaggaaggaggatctgaacatgggagtcaacattaaaaagctgagggagctgatcgtgggccaatactttcccgaggtcctcgacaaagaatacgacctctccaagaatggagacagcgtggtgacatacagaagcaagatttataccgtgatgaattacattctgctgtattacctcgaggaccacgactccagcagagaaagcatggtcgaagctctgagacaaaacagagagggcgatgaaggcaaggaggagatctatagacagtttgccaagaaggtgtggaacggcgtgtccggactgtttggcgtgtgtctgaacctcttcaagaccgaaaagagaaacaagtttaggagcaaagtcgccctccccgatgtgtccggcgctgcctatatgctctcctccgagaacatcgactactttgtcaagatgctcttctttgtgtgtaagtttctggatggcaaagaaatcaacgagctgctgtgcgctctgatcaacaaatttgataatattgccgatattctggatgctgccgctcaatgtggctcctccgtctggttcgtggacagctataggttcttcgagagatctaggaggattagcgcccagattagaatcgtgaagaacatcgcttccaaggattttaagaaatccaagaaggattccgatgagagctaccccgagcagctgtatctggatgctctggctctgctcggagacgtcatctccaagtacaagcagaatagagatggcagcgtcgtcatcgatgaccaaggcaatgccgtgctgacagagcaatacaagaggtttagatatgaatttttcgaggagatcaagagggacgaaagcggcggcatcaagtacaagaagtccggaaaacccgagtacaaccatcagagaaggaattttattctgaataatgtgctgaaaagcaaatggtttttctatgtggtgaagtacaataggcccagcagctgcagagaactgatgaagaataaggaaattctgaggttcgtgctgagagacatccccgactcccaagtgagaagatactttaaggccgtccaaggagaggaagcttacgctagcgccgaagctatgaggacaagactggtcgacgctctgtcccaatttagcgtcacagcttgtctggatgaagtgggcggcatgacagacaaggaattcgcctcccagagggccgtcgatagcaaagaaaaactgagagccatcatcagactgtatctgacagtcgcctatctgattaccaagagcatggtgaaggtgaatacaaggtttagcattgcctttagcgtgctggagagggactactatctgctcattgacggcaagaagaaatccagcgactacaccggagaggatatgctggctctgaccagaaaatttgtgggcgaagatgctggactgtatagagagtggaaagagaagaacgctgaagccaaggacaaatattttgacaaggccgaaaggaagaaggtgctgagacagaacgataagatgatcagaaagatgcacttcacaccccactccctcaattacgtccaaaagaatctcgaaagcgtccagagcaacggactggccgccgtcatcaaggaatatagaaatgccgtcgctgccctcaatatcatcaatagactggacgagtacattggctccgctagggctgatagctactactctctgtactgttactgcctccaaatgtatctgagcaagaacttcagcgtgggctacctcatcaacgtgcaaaagcagctggaggagcaccacacctacatgaaggatctcatgtggctgctcaacatccccttcgcttacaacctcgccagatacaaaaatctgtccaacgaaaaactcttttacgacgaggaagccgccgccgaaaaggctgacaaggctgagaacgagagaggcgaaggaagccccaagaagaaaaggaaggtcgaggactacccctacgatgtgcccgactacgcctaagcggccgctctagagttgttgttgataatcaacctctggattacaaaatttgtgaaagattgactggtattcttaactatgttgctccttttacgctatgtggatacgctgctttaatgcctttgtatcatgctattgcttcccgtatggctttcattttctcctccttgtataaatcctggttagttcttgccacggcggaactcatcgccgcctgccttgcccgctgctggacaggggctcggctgttgggcactgacaattccgtggaacttgtttattgcagcttataatggttacaaataaagcaatagcatcacaaatttcacaaataaagcatttttttcactgcattctagttgtggtttgtccaaactcatcaatgtatcttaacgcggtaaccacgtgcggacccaacggccgcaggaacccctagtgatggagttggccactccctctctgcgcgctcgctcgctcactgaggccgggcgaccaaaggtcgcccgacgcccgggctttgcccgggcggcctcagtgagcgagcgagcgcgcagctgcctgcagg

SEQ ID NO: 589 - DNA, 4463 bp, Artificial Sequence
  A01922: Nucleotide sequence whole transgene including ITRs
cctgcaggcagctgcgcgctcgctcgctcactgaggccgcccgggcgtcgggcgacctttggtcgcccggcctcagtgagcgagcgagcgcgcagagagggagtggccaactccatcactaggggttcctgcggccggtcgcgtctagtagagggcctatttcccatgattccttcatatttgcatatacgatacaaggctgttagagagataattggaattaatttgactgtaaacacaaagatattagtacaaaatacgtgacgtagaaagtaataatttcttgggtagtttgcagttttaaaattatgttttaaaatggactatcatatgcttaccgtaacttgaaagtatttcgatttcttggctttatatatcttgtggaaaggacgaaacaccgtagccctgcagtaaggcagggttctaagacctgctgctgctgctgctgctgctgctttttttgaattccaccacactggactagtggatcctaggtcttgaaaggagtgggaattggctccggtgcccgtcagtgggcagagcgcacatcgcccacagtccccgagaagttggggggaggggtcggcaattgatccggtgcctagagaaggtggcgcggggtaaactgggaaagtgatgtcgtgtactggctccgcctttttcccgagggtgggggagaaccgtatataagtgcagtagtcgccgtgaacgttctttttcgcaacgggtttgccgccagaacacaggtcacgcttaactaacgcgtgccgccaccatgaagaagaagcaccagagcgccgccgagaagaggcaagtgaagaagctcaagaatcaagagaaggcccagaagtacgctagcgagccttcccccctccagagcgatacagctggcgtggaatgctcccagaaaaagacagtcgtcagccacattgccagctccaagacactggccaaggctatgggactcaaatccacactggtcatgggcgacaagctggtcatcaccagctttgctgctagcaaggctgtcggaggcgctggctacaaaagcgctaacattgaaaaaatcacagatctgcaaggaagggtcattgaggagcacgaaaggatgtttagcgccgatgtcggagagaaaaatatcgaactgagcaagaatgactgccacaccaacgtcaacaaccccgtggtgaccaacatcggaaaggattacatcggactgaaatctaggctggagcaagagtttttcggcaagacattcgagaatgacaatctgcatgtgcagctggcctacaatatcctcgacatcaagaaaattctgggaacctatgtgaacaatatcatttatatcttctacaatctgaatagggctggcaccggcagagatgagaggatgtatgacgacctcatcggcacactgtacgcttacaaacccatggaggctcaacagacctatctgctcaaaggcgacaaggatatgaggaggtttgaggaggtgaaacagctgctgcaaaacacctccgcttactatgtgtattacggcacactgttcgagaaggtgaaggctaagagcaagaaggaacagagggctaaggaggccgaaatcgacgcttgtaccgcccataactacgatgtgctgagactgctgtccctcatggcgcagctgtgcatggcctccgtcgctggaacagcctttaagctggctgagtccgctctgttcaacattgaggatgtgctcagcgccgatctgaaggaaatcctcgatgaagccttctccggcgccgtgaacaagctcaatgacggattcgtgcagcactccggcaacaatctgtacgtgctccagcagctgtaccctaatgagaccatcgagagaatcgccgagaagtactacagactcaccgtgaggaaggaggatctgaacatgggagtcaacattaaaaagctgagggagctgatcgtgggccaatactttcccgaggtcctcgacaaagaatacgacctctccaagaatggagacagcgtggtgacatacagaagcaagatttataccgtgatgaattacattctgctgtattacctcgaggaccacgactccagcagagaaagcatggtcgaagctctgagacaaaacagagagggcgatgaaggcaaggaggagatctatagacagtttgccaagaaggtgtggaacggcgtgtccggactgtttggcgtgtgtctgaacctcttcaagaccgaaaagagaaacaagtttaggagcaaagtcgccctccccgatgtgtccggcgctgcctatatgctctcctccgagaacatcgactactttgtcaagatgctcttctttgtgtgtaagtttctggatggcaaagaaatcaacgagctgctgtgcgctctgatcaacaaatttgataatattgccgatattctggatgctgccgctcaatgtggctcctccgtctggttcgtggacagctataggttcttcgagagatctaggaggattagcgcccagattagaatcgtgaagaacatcgcttccaaggattttaagaaatccaagaaggattccgatgagagctaccccgagcagctgtatctggatgctctggctctgctcggagacgtcatctccaagtacaagcagaatagagatggcagcgtcgtcatcgatgaccaaggcaatgccgtgctgacagagcaatacaagaggtttagatatgaatttttcgaggagatcaagagggacgaaagcggcggcatcaagtacaagaagtccggaaaacccgagtacaaccatcagagaaggaattttattctgaataatgtgctgaaaagcaaatggtttttctatgtggtgaagtacaataggcccagcagctgcagagaactgatgaagaataaggaaattctgaggttcgtgctgagagacatccccgactcccaagtgagaagatactttaaggccgtccaaggagaggaagcttacgctagcgccgaagctatgaggacaagactggtcgacgctctgtcccaatttagcgtcacagcttgtctggatgaagtgggcggcatgacagacaaggaattcgcctcccagagggccgtcgatagcaaagaaaaactgagagccatcatcagactgtatctgacagtcgcctatctgattaccaagagcatggtgaaggtgaatacaaggtttagcattgcctttagcgtgctggagagggactactatctgctcattgacggcaagaagaaatccagcgactacaccggagaggatatgctggctctgaccagaaaatttgtgggcgaagatgctggactgtatagagagtggaaagagaagaacgctgaagccaaggacaaatattttgacaaggccgaaaggaagaaggtgctgagacagaacgataagatgatcagaaagatgcacttcacaccccactccctcaattacgtccaaaagaatctcgaaagcgtccagagcaacggactggccgccgtcatcaaggaatatgcaaatgccgtcgctgccctcaatatcatcaatagactggacgagtacattggctccgctagggctgatagctactactctctgtactgttactgcctccaaatgtatctgagcaagaacttcagcgtgggctacctcatcaacgtgcaaaagcagctggaggagcaccacacctacatgaaggatctcatgtggctgctcaacatccccttcgcttacaacctcgccagatacaaaaatctgtccaacgaaaaactcttttacgacgaggaagccgccgccgaaaaggctgacaaggctgagaacgagagaggcgaaggaagccccaagaagaaaaggaaggtcgaggactacccctacgatgtgcccgactacgcctaagcggccgctctagagttgttgttgataatcaacctctggattacaaaatttgtgaaagattgactggtattcttaactatgttgctccttttacgctatgtggatacgctgctttaatgcctttgtatcatgctattgcttcccgtatggctttcattttctcctccttgtataaatcctggttagttcttgccacggcggaactcatcgccgcctgccttgcccgctgctggacaggggctcggctgttgggcactgacaattccgtggaacttgtttattgcagcttataatggttacaaataaagcaatagcatcacaaatttcacaaataaagcatttttttcactgcattctagttgtggtttgtccaaactcatcaatgtatcttaacgcggtaaccacgtgcggacccaacggccgcaggaacccctagtgatggagttggccactccctctctgcgcgctcgctcgctcactgaggccgggcgaccaaaggtcgcccgacgcccgggctttgcccgggcggcctcagtgagcgagcgagcgcgcagctgcctgcagg

SEQ ID NO: 590 - protein, 1019 aa, Artificial Sequence
  dCas13d seq 212 4 point mutations
KKKHQSAAEKRQVKKLKNQEKAQKYASEPSPLQSDTAGVECSQKKTVVSHIASSKTLAKAMGLKSTLVMGDKLVITSFAASKAVGGAGYKSANIEKITDLQGRVIEEHERMFSADVGEKNIELSKNDCHTNVNNPVVTNIGKDYIGLKSRLEQEFFGKTFENDNLHVQLAYNILDIKKILGTYVNNIIYIFYNLNRAGTGRDERMYDDLIGTLYAYKPMEAQQTYLLKGDKDMRRFEEVKQLLQNTSAYYVYYGTLFEKVKAKSKKEQRAKEAEIDACTAHNYDVLRLLSLMAQLCMASVAGTAFKLAESALFNIEDVLSADLKEILDEAFSGAVNKLNDGFVQHSGNNLYVLQQLYPNETIERIAEKYYRLTVRKEDLNMGVNIKKLRELIVGQYFPEVLDKEYDLSKNGDSVVTYRSKIYTVMNYILLYYLEDHDSSRESMVEALRQNREGDEGKEEIYRQFAKKVWNGVSGLFGVCLNLFKTEKRNKFRSKVALPDVSGAAYMLSSENIDYFVKMLFFVCKFLDGKEINELLCALINKFDNIADILDAAAQCGSSVWFVDSYRFFERSRRISAQIRIVKNIASKDFKKSKKDSDESYPEQLYLDALALLGDVISKYKQNRDGSVVIDDQGNAVLTEQYKRFRYEFFEEIKRDESGGIKYKKSGKPEYNHQRRNFILNNVLKSKWFFYVVKYNRPSSCRELMKNKEILRFVLRDIPDSQVRRYFKAVQGEEAYASAEAMRTRLVDALSQFSVTACLDEVGGMTDKEFASQRAVDSKEKLRAIIRLYLTVAYLITKSMVKVNTRFSIAFSVLERDYYLLIDGKKKSSDYTGEDMLALTRKFVGEDAGLYREWKEKNAEAKDKYFDKAERKKVLRQNDKMIRKMHFTPHSLNYVQKNLESVQSNGLAAVIKEYANAVAALNIINRLDEYIGSARADSYYSLYCYCLQMYLSKNFSVGYLINVQKQLEEHHTYMKDLMWLLNIPFAYNLARYKNLSNEKLFYDEEAAAEKADKAENERGE

SEQ ID NO: 591 - protein, 1019 aa, Artificial Sequence
  dcas13d dSeq212 (1 point mutation on catalytic domain, R914A at HEPN2
KKKHQSAAEKRQVKKLKNQEKAQKYASEPSPLQSDTAGVECSQKKTVVSHIASSKTLAKAMGLKSTLVMGDKLVITSFAASKAVGGAGYKSANIEKITDLQGRVIEEHERMFSADVGEKNIELSKNDCHTNVNNPVVTNIGKDYIGLKSRLEQEFFGKTFENDNLHVQLAYNILDIKKILGTYVNNIIYIFYNLNRAGTGRDERMYDDLIGTLYAYKPMEAQQTYLLKGDKDMRRFEEVKQLLQNTSAYYVYYGTLFEKVKAKSKKEQRAKEAEIDACTAHNYDVLRLLSLMRQLCMHSVAGTAFKLAESALFNIEDVLSADLKEILDEAFSGAVNKLNDGFVQHSGNNLYVLQQLYPNETIERIAEKYYRLTVRKEDLNMGVNIKKLRELIVGQYFPEVLDKEYDLSKNGDSVVTYRSKIYTVMNYILLYYLEDHDSSRESMVEALRQNREGDEGKEEIYRQFAKKVWNGVSGLFGVCLNLFKTEKRNKFRSKVALPDVSGAAYMLSSENIDYFVKMLFFVCKFLDGKEINELLCALINKFDNIADILDAAAQCGSSVWFVDSYRFFERSRRISAQIRIVKNIASKDFKKSKKDSDESYPEQLYLDALALLGDVISKYKQNRDGSVVIDDQGNAVLTEQYKRFRYEFFEEIKRDESGGIKYKKSGKPEYNHQRRNFILNNVLKSKWFFYVVKYNRPSSCRELMKNKEILRFVLRDIPDSQVRRYFKAVQGEEAYASAEAMRTRLVDALSQFSVTACLDEVGGMTDKEFASQRAVDSKEKLRAIIRLYLTVAYLITKSMVKVNTRFSIAFSVLERDYYLLIDGKKKSSDYTGEDMLALTRKFVGEDAGLYREWKEKNAEAKDKYFDKAERKKVLRQNDKMIRKMHFTPHSLNYVQKNLESVQSNGLAAVIKEYANAVAHLNIINRLDEYIGSARADSYYSLYCYCLQMYLSKNFSVGYLINVQKQLEEHHTYMKDLMWLLNIPFAYNLARYKNLSNEKLFYDEEAAAEKADKAENERGE

SEQ ID NO: 592 - protein, 1019 aa, Artificial Sequence
  dcas13d dSeq212 (1 point mutation on catalytic domain, H298A at HEPN2
KKKHQSAAEKRQVKKLKNQEKAQKYASEPSPLQSDTAGVECSQKKTVVSHIASSKTLAKAMGLKSTLVMGDKLVITSFAASKAVGGAGYKSANIEKITDLQGRVIEEHERMFSADVGEKNIELSKNDCHTNVNNPVVTNIGKDYIGLKSRLEQEFFGKTFENDNLHVQLAYNILDIKKILGTYVNNIIYIFYNLNRAGTGRDERMYDDLIGTLYAYKPMEAQQTYLLKGDKDMRRFEEVKQLLQNTSAYYVYYGTLFEKVKAKSKKEQRAKEAEIDACTAHNYDVLRLLSLMRQLCMASVAGTAFKLAESALFNIEDVLSADLKEILDEAFSGAVNKLNDGFVQHSGNNLYVLQQLYPNETIERIAEKYYRLTVRKEDLNMGVNIKKLRELIVGQYFPEVLDKEYDLSKNGDSVVTYRSKIYTVMNYILLYYLEDHDSSRESMVEALRQNREGDEGKEEIYRQFAKKVWNGVSGLFGVCLNLFKTEKRNKFRSKVALPDVSGAAYMLSSENIDYFVKMLFFVCKFLDGKEINELLCALINKFDNIADILDAAAQCGSSVWFVDSYRFFERSRRISAQIRIVKNIASKDFKKSKKDSDESYPEQLYLDALALLGDVISKYKQNRDGSVVIDDQGNAVLTEQYKRFRYEFFEEIKRDESGGIKYKKSGKPEYNHQRRNFILNNVLKSKWFFYVVKYNRPSSCRELMKNKEILRFVLRDIPDSQVRRYFKAVQGEEAYASAEAMRTRLVDALSQFSVTACLDEVGGMTDKEFASQRAVDSKEKLRAIIRLYLTVAYLITKSMVKVNTRFSIAFSVLERDYYLLIDGKKKSSDYTGEDMLALTRKFVGEDAGLYREWKEKNAEAKDKYFDKAERKKVLRQNDKMIRKMHFTPHSLNYVQKNLESVQSNGLAAVIKEYRNAVAHLNIINRLDEYIGSARADSYYSLYCYCLQMYLSKNFSVGYLINVQKQLEEHHTYMKDLMWLLNIPFAYNLARYKNLSNEKLFYDEEAAAEKADKAENERGE

SEQ ID NO: 593 - protein, 1019 aa, Artificial Sequence
  dcas13d dSeq212 (1 point mutation on catalytic domain, R293A at HEPN2
KKKHQSAAEKRQVKKLKNQEKAQKYASEPSPLQSDTAGVECSQKKTVVSHIASSKTLAKAMGLKSTLVMGDKLVITSFAASKAVGGAGYKSANIEKITDLQGRVIEEHERMFSADVGEKNIELSKNDCHTNVNNPVVTNIGKDYIGLKSRLEQEFFGKTFENDNLHVQLAYNILDIKKILGTYVNNIIYIFYNLNRAGTGRDERMYDDLIGTLYAYKPMEAQQTYLLKGDKDMRRFEEVKQLLQNTSAYYVYYGTLFEKVKAKSKKEQRAKEAEIDACTAHNYDVLRLLSLMAQLCMHSVAGTAFKLAESALFNIEDVLSADLKEILDEAFSGAVNKLNDGFVQHSGNNLYVLQQLYPNETIERIAEKYYRLTVRKEDLNMGVNIKKLRELIVGQYFPEVLDKEYDLSKNGDSVVTYRSKIYTVMNYILLYYLEDHDSSRESMVEALRQNREGDEGKEEIYRQFAKKVWNGVSGLFGVCLNLFKTEKRNKFRSKVALPDVSGAAYMLSSENIDYFVKMLFFVCKFLDGKEINELLCALINKFDNIADILDAAAQCGSSVWFVDSYRFFERSRRISAQIRIVKNIASKDFKKSKKDSDESYPEQLYLDALALLGDVISKYKQNRDGSVVIDDQGNAVLTEQYKRFRYEFFEEIKRDESGGIKYKKSGKPEYNHQRRNFILNNVLKSKWFFYVVKYNRPSSCRELMKNKEILRFVLRDIPDSQVRRYFKAVQGEEAYASAEAMRTRLVDALSQFSVTACLDEVGGMTDKEFASQRAVDSKEKLRAIIRLYLTVAYLITKSMVKVNTRFSIAFSVLERDYYLLIDGKKKSSDYTGEDMLALTRKFVGEDAGLYREWKEKNAEAKDKYFDKAERKKVLRQNDKMIRKMHFTPHSLNYVQKNLESVQSNGLAAVIKEYRNAVAHLNIINRLDEYIGSARADSYYSLYCYCLQMYLSKNFSVGYLINVQKQLEEHHTYMKDLMWLLNIPFAYNLARYKNLSNEKLFYDEEAAAEKADKAENERGE

SEQ ID NO: 594 - protein, 1019 aa, Artificial Sequence
  dcas13d dSeq212 (1 point mutation on catalytic domain, K992A at HEPN2
KKKHQSAAEKRQVKKLKNQEKAQKYASEPSPLQSDTAGVECSQKKTVVSHIASSKTLAKAMGLKSTLVMGDKLVITSFAASKAVGGAGYKSANIEKITDLQGRVIEEHERMFSADVGEKNIELSKNDCHTNVNNPVVTNIGKDYIGLKSRLEQEFFGKTFENDNLHVQLAYNILDIKKILGTYVNNIIYIFYNLNRAGTGRDERMYDDLIGTLYAYKPMEAQQTYLLKGDKDMRRFEEVKQLLQNTSAYYVYYGTLFEKVKAKSKKEQRAKEAEIDACTAHNYDVLRLLSLMRQLCMHSVAGTAFKLAESALFNIEDVLSADLKEILDEAFSGAVNKLNDGFVQHSGNNLYVLQQLYPNETIERIAEKYYRLTVRKEDLNMGVNIKKLRELIVGQYFPEVLDKEYDLSKNGDSVVTYRSKIYTVMNYILLYYLEDHDSSRESMVEALRQNREGDEGKEEIYRQFAKKVWNGVSGLFGVCLNLFKTEKRNKFRSKVALPDVSGAAYMLSSENIDYFVKMLFFVCKFLDGKEINELLCALINKFDNIADILDAAAQCGSSVWFVDSYRFFERSRRISAQIRIVKNIASKDFKKSKKDSDESYPEQLYLDALALLGDVISKYKQNRDGSVVIDDQGNAVLTEQYKRFRYEFFEEIKRDESGGIKYKKSGKPEYNHQRRNFILNNVLKSKWFFYVVKYNRPSSCRELMKNKEILRFVLRDIPDSQVRRYFKAVQGEEAYASAEAMRTRLVDALSQFSVTACLDEVGGMTDKEFASQRAVDSKEKLRAIIRLYLTVAYLITKSMVKVNTRFSIAFSVLERDYYLLIDGKKKSSDYTGEDMLALTRKFVGEDAGLYREWKEKNAEAKDKYFDKAERKKVLRQNDKMIRKMHFTPHSLNYVQKNLESVQSNGLAAVIKEYRNAVAHLNIINRLDEYIGSARADSYYSLYCYCLQMYLSKNFSVGYLINVQKQLEEHHTYMKDLMWLLNIPFAYNLARYANLSNEKLFYDEEAAAEKADKAENERGE

SEQ ID NO: 595 - protein, 10 aa, Artificial Sequence
  Myc tag
EQKLISEEDL

SEQ ID NO: 596 - DNA, 30 bp, Artificial Sequence
  dCas13d DR
tagccctgcagtaaggcagggttctaagac

SEQ ID NO: 597 - DNA, 130 bp, Artificial Sequence
  ITR
cctgcaggcagctgcgcgctcgctcgctcactgaggccgcccgggcgtcgggcgacctttggtcgcccggcctcagtgagcgagcgagcgcgcagagagggagtggccaactccatcactaggggttcct

SEQ ID NO: 598 - DNA, 141 bp, Artificial Sequence
  ITR
aggaacccctagtgatggagttggccactccctctctgcgcgctcgctcgctcactgaggccgggcgaccaaaggtcgcccgacgcccgggctttgcccgggcggcctcagtgagcgagcgagcgcgcagctgcctgcagg

SEQ ID NO: 599 - DNA, 3057 bp, Artificial Sequence
  dCas13d
aagaagaagcaccagagcgccgccgagaagaggcaagtgaagaagctcaagaatcaagagaaggcccagaagtacgctagcgagccttcccccctccagagcgatacagctggcgtggaatgctcccagaaaaagacagtcgtcagccacattgccagctccaagacactggccaaggctatgggactcaaatccacactggtcatgggcgacaagctggtcatcaccagctttgctgctagcaaggctgtcggaggcgctggctacaaaagcgctaacattgaaaaaatcacagatctgcaaggaagggtcattgaggagcacgaaaggatgtttagcgccgatgtcggagagaaaaatatcgaactgagcaagaatgactgccacaccaacgtcaacaaccccgtggtgaccaacatcggaaaggattacatcggactgaaatctaggctggagcaagagtttttcggcaagacattcgagaatgacaatctgcatgtgcagctggcctacaatatcctcgacatcaagaaaattctgggaacctatgtgaacaatatcatttatatcttctacaatctgaatagggctggcaccggcagagatgagaggatgtatgacgacctcatcggcacactgtacgcttacaaacccatggaggctcaacagacctatctgctcaaaggcgacaaggatatgaggaggtttgaggaggtgaaacagctgctgcaaaacacctccgcttactatgtgtattacggcacactgttcgagaaggtgaaggctaagagcaagaaggaacagagggctaaggaggccgaaatcgacgcttgtaccgcccataactacgatgtgctgagactgctgtccctcatgaggcagctgtgcatgcactccgtcgctggaacagcctttaagctggctgagtccgctctgttcaacattgaggatgtgctcagcgccgatctgaaggaaatcctcgatgaagccttctccggcgccgtgaacaagctcaatgacggattcgtgcagcactccggcaacaatctgtacgtgctccagcagctgtaccctaatgagaccatcgagagaatcgccgagaagtactacagactcaccgtgaggaaggaggatctgaacatgggagtcaacattaaaaagctgagggagctgatcgtgggccaatactttcccgaggtcctcgacaaagaatacgacctctccaagaatggagacagcgtggtgacatacagaagcaagatttataccgtgatgaattacattctgctgtattacctcgaggaccacgactccagcagagaaagcatggtcgaagctctgagacaaaacagagagggcgatgaaggcaaggaggagatctatagacagtttgccaagaaggtgtggaacggcgtgtccggactgtttggcgtgtgtctgaacctcttcaagaccgaaaagagaaacaagtttaggagcaaagtcgccctccccgatgtgtccggcgctgcctatatgctctcctccgagaacatcgactactttgtcaagatgctcttctttgtgtgtaagtttctggatggcaaagaaatcaacgagctgctgtgcgctctgatcaacaaatttgataatattgccgatattctggatgctgccgctcaatgtggctcctccgtctggttcgtggacagctataggttcttcgagagatctaggaggattagcgcccagattagaatcgtgaagaacatcgcttccaaggattttaagaaatccaagaaggattccgatgagagctaccccgagcagctgtatctggatgctctggctctgctcggagacgtcatctccaagtacaagcagaatagagatggcagcgtcgtcatcgatgaccaaggcaatgccgtgctgacagagcaatacaagaggtttagatatgaatttttcgaggagatcaagagggacgaaagcggcggcatcaagtacaagaagtccggaaaacccgagtacaaccatcagagaaggaattttattctgaataatgtgctgaaaagcaaatggtttttctatgtggtgaagtacaataggcccagcagctgcagagaactgatgaagaataaggaaattctgaggttcgtgctgagagacatccccgactcccaagtgagaagatactttaaggccgtccaaggagaggaagcttacgctagcgccgaagctatgaggacaagactggtcgacgctctgtcccaatttagcgtcacagcttgtctggatgaagtgggcggcatgacagacaaggaattcgcctcccagagggccgtcgatagcaaagaaaaactgagagccatcatcagactgtatctgacagtcgcctatctgattaccaagagcatggtgaaggtgaatacaaggtttagcattgcctttagcgtgctggagagggactactatctgctcattgacggcaagaagaaatccagcgactacaccggagaggatatgctggctctgaccagaaaatttgtgggcgaagatgctggactgtatagagagtggaaagagaagaacgctgaagccaaggacaaatattttgacaaggccgaaaggaagaaggtgctgagacagaacgataagatgatcagaaagatgcacttcacaccccactccctcaattacgtccaaaagaatctcgaaagcgtccagagcaacggactggccgccgtcatcaaggaatatagaaatgccgtcgctgccctcaatatcatcaatagactggacgagtacattggctccgctagggctgatagctactactctctgtactgttactgcctccaaatgtatctgagcaagaacttcagcgtgggctacctcatcaacgtgcaaaagcagctggaggagcaccacacctacatgaaggatctcatgtggctgctcaacatccccttcgcttacaacctcgccagatacaaaaatctgtccaacgaaaaactcttttacgacgaggaagccgccgccgaaaaggctgacaaggctgagaacgagagaggcgaa

SEQ ID NO: 600 - DNA, 3057 bp, Artificial Sequence
  dCas13d
aagaagaagcaccagagcgccgccgagaagaggcaagtgaagaagctcaagaatcaagagaaggcccagaagtacgctagcgagccttcccccctccagagcgatacagctggcgtggaatgctcccagaaaaagacagtcgtcagccacattgccagctccaagacactggccaaggctatgggactcaaatccacactggtcatgggcgacaagctggtcatcaccagctttgctgctagcaaggctgtcggaggcgctggctacaaaagcgctaacattgaaaaaatcacagatctgcaaggaagggtcattgaggagcacgaaaggatgtttagcgccgatgtcggagagaaaaatatcgaactgagcaagaatgactgccacaccaacgtcaacaaccccgtggtgaccaacatcggaaaggattacatcggactgaaatctaggctggagcaagagtttttcggcaagacattcgagaatgacaatctgcatgtgcagctggcctacaatatcctcgacatcaagaaaattctgggaacctatgtgaacaatatcatttatatcttctacaatctgaatagggctggcaccggcagagatgagaggatgtatgacgacctcatcggcacactgtacgcttacaaacccatggaggctcaacagacctatctgctcaaaggcgacaaggatatgaggaggtttgaggaggtgaaacagctgctgcaaaacacctccgcttactatgtgtattacggcacactgttcgagaaggtgaaggctaagagcaagaaggaacagagggctaaggaggccgaaatcgacgcttgtaccgcccataactacgatgtgctgagactgctgtccctcatggcgcagctgtgcatggcctccgtcgctggaacagcctttaagctggctgagtccgctctgttcaacattgaggatgtgctcagcgccgatctgaaggaaatcctcgatgaagccttctccggcgccgtgaacaagctcaatgacggattcgtgcagcactccggcaacaatctgtacgtgctccagcagctgtaccctaatgagaccatcgagagaatcgccgagaagtactacagactcaccgtgaggaaggaggatctgaacatgggagtcaacattaaaaagctgagggagctgatcgtgggccaatactttcccgaggtcctcgacaaagaatacgacctctccaagaatggagacagcgtggtgacatacagaagcaagatttataccgtgatgaattacattctgctgtattacctcgaggaccacgactccagcagagaaagcatggtcgaagctctgagacaaaacagagagggcgatgaaggcaaggaggagatctatagacagtttgccaagaaggtgtggaacggcgtgtccggactgtttggcgtgtgtctgaacctcttcaagaccgaaaagagaaacaagtttaggagcaaagtcgccctccccgatgtgtccggcgctgcctatatgctctcctccgagaacatcgactactttgtcaagatgctcttctttgtgtgtaagtttctggatggcaaagaaatcaacgagctgctgtgcgctctgatcaacaaatttgataatattgccgatattctggatgctgccgctcaatgtggctcctccgtctggttcgtggacagctataggttcttcgagagatctaggaggattagcgcccagattagaatcgtgaagaacatcgcttccaaggattttaagaaatccaagaaggattccgatgagagctaccccgagcagctgtatctggatgctctggctctgctcggagacgtcatctccaagtacaagcagaatagagatggcagcgtcgtcatcgatgaccaaggcaatgccgtgctgacagagcaatacaagaggtttagatatgaatttttcgaggagatcaagagggacgaaagcggcggcatcaagtacaagaagtccggaaaacccgagtacaaccatcagagaaggaattttattctgaataatgtgctgaaaagcaaatggtttttctatgtggtgaagtacaataggcccagcagctgcagagaactgatgaagaataaggaaattctgaggttcgtgctgagagacatccccgactcccaagtgagaagatactttaaggccgtccaaggagaggaagcttacgctagcgccgaagctatgaggacaagactggtcgacgctctgtcccaatttagcgtcacagcttgtctggatgaagtgggcggcatgacagacaaggaattcgcctcccagagggccgtcgatagcaaagaaaaactgagagccatcatcagactgtatctgacagtcgcctatctgattaccaagagcatggtgaaggtgaatacaaggtttagcattgcctttagcgtgctggagagggactactatctgctcattgacggcaagaagaaatccagcgactacaccggagaggatatgctggctctgaccagaaaatttgtgggcgaagatgctggactgtatagagagtggaaagagaagaacgctgaagccaaggacaaatattttgacaaggccgaaaggaagaaggtgctgagacagaacgataagatgatcagaaagatgcacttcacaccccactccctcaattacgtccaaaagaatctcgaaagcgtccagagcaacggactggccgccgtcatcaaggaatatgcaaatgccgtcgctgccctcaatatcatcaatagactggacgagtacattggctccgctagggctgatagctactactctctgtactgttactgcctccaaatgtatctgagcaagaacttcagcgtgggctacctcatcaacgtgcaaaagcagctggaggagcaccacacctacatgaaggatctcatgtggctgctcaacatccccttcgcttacaacctcgccagatacaaaaatctgtccaacgaaaaactcttttacgacgaggaagccgccgccgaaaaggctgacaaggctgagaacgagagaggcgaa

SEQ ID NO: 601 - DNA, 3057 bp, Artificial Sequence; identical to SEQ ID NO: 599
  dCas13d

SEQ ID NO: 602 - DNA, 3057 bp, Artificial Sequence
  dCas13d
aagaagaagcaccagagcgccgccgagaagaggcaagtgaagaagctcaagaatcaagagaaggcccagaagtacgctagcgagccttcccccctccagagcgatacagctggcgtggaatgctcccagaaaaagacagtcgtcagccacattgccagctccaagacactggccaaggctatgggactcaaatccacactggtcatgggcgacaagctggtcatcaccagctttgctgctagcaaggctgtcggaggcgctggctacaaaagcgctaacattgaaaaaatcacagatctgcaaggaagggtcattgaggagcacgaaaggatgtttagcgccgatgtcggagagaaaaatatcgaactgagcaagaatgactgccacaccaacgtcaacaaccccgtggtgaccaacatcggaaaggattacatcggactgaaatctaggctggagcaagagtttttcggcaagacattcgagaatgacaatctgcatgtgcagctggcctacaatatcctcgacatcaagaaaattctgggaacctatgtgaacaatatcatttatatcttctacaatctgaatagggctggcaccggcagagatgagaggatgtatgacgacctcatcggcacactgtacgcttacaaacccatggaggctcaacagacctatctgctcaaaggcgacaaggatatgaggaggtttgaggaggtgaaacagctgctgcaaaacacctccgcttactatgtgtattacggcacactgttcgagaaggtgaaggctaagagcaagaaggaacagagggctaaggaggccgaaatcgacgcttgtaccgcccataactacgatgtgctgagactgctgtccctcatgaggcagctgtgcatggcctccgtcgctggaacagcctttaagctggctgagtccgctctgttcaacattgaggatgtgctcagcgccgatctgaaggaaatcctcgatgaagccttctccggcgccgtgaacaagctcaatgacggattcgtgcagcactccggcaacaatctgtacgtgctccagcagctgtaccctaatgagaccatcgagagaatcgccgagaagtactacagactcaccgtgaggaaggaggatctgaacatgggagtcaacattaaaaagctgagggagctgatcgtgggccaatactttcccgaggtcctcgacaaagaatacgacctctccaagaatggagacagcgtggtgacatacagaagcaagatttataccgtgatgaattacattctgctgtattacctcgaggaccacgactccagcagagaaagcatggtcgaagctctgagacaaaacagagagggcgatgaaggcaaggaggagatctatagacagtttgccaagaaggtgtggaacggcgtgtccggactgtttggcgtgtgtctgaacctcttcaagaccgaaaagagaaacaagtttaggagcaaagtcgccctccccgatgtgtccggcgctgcctatatgctctcctccgagaacatcgactactttgtcaagatgctcttctttgtgtgtaagtttctggatggcaaagaaatcaacgagctgctgtgcgctctgatcaacaaatttgataatattgccgatattctggatgctgccgctcaatgtggctcctccgtctggttcgtggacagctataggttcttcgagagatctaggaggattagcgcccagattagaatcgtgaagaacatcgcttccaaggattttaagaaatccaagaaggattccgatgagagctaccccgagcagctgtatctggatgctctggctctgctcggagacgtcatctccaagtacaagcagaatagagatggcagcgtcgtcatcgatgaccaaggcaatgccgtgctgacagagcaatacaagaggtttagatatgaatttttcgaggagatcaagagggacgaaagcggcggcatcaagtacaagaagtccggaaaacccgagtacaaccatcagagaaggaattttattctgaataatgtgctgaaaagcaaatggtttttctatgtggtgaagtacaataggcccagcagctgcagagaactgatgaagaataaggaaattctgaggttcgtgctgagagacatccccgactcccaagtgagaagatactttaaggccgtccaaggagaggaagcttacgctagcgccgaagctatgaggacaagactggtcgacgctctgtcccaatttagcgtcacagcttgtctggatgaagtgggcggcatgacagacaaggaattcgcctcccagagggccgtcgatagcaaagaaaaactgagagccatcatcagactgtatctgacagtcgcctatctgattaccaagagcatggtgaaggtgaatacaaggtttagcattgcctttagcgtgctggagagggactactatctgctcattgacggcaagaagaaatccagcgactacaccggagaggatatgctggctctgaccagaaaatttgtgggcgaagatgctggactgtatagagagtggaaagagaagaacgctgaagccaaggacaaatattttgacaaggccgaaaggaagaaggtgctgagacagaacgataagatgatcagaaagatgcacttcacaccccactccctcaattacgtccaaaagaatctcgaaagcgtccagagcaacggactggccgccgtcatcaaggaatatagaaatgccgtcgctcacctcaatatcatcaatagactggacgagtacattggctccgctagggctgatagctactactctctgtactgttactgcctccaaatgtatctgagcaagaacttcagcgtgggctacctcatcaacgtgcaaaagcagctggaggagcaccacacctacatgaaggatctcatgtggctgctcaacatccccttcgcttacaacctcgccagatacaaaaatctgtccaacgaaaaactcttttacgacgaggaagccgccgccgaaaaggctgacaaggctgagaacgagagaggcgaa

SEQ ID NO: 603 - DNA, 3057 bp, Artificial Sequence
  dCas13d
aagaagaagcaccagagcgccgccgagaagaggcaagtgaagaagctcaagaatcaagagaaggcccagaagtacgctagcgagccttcccccctccagagcgatacagctggcgtggaatgctcccagaaaaagacagtcgtcagccacattgccagctccaagacactggccaaggctatgggactcaaatccacactggtcatgggcgacaagctggtcatcaccagctttgctgctagcaaggctgtcggaggcgctggctacaaaagcgctaacattgaaaaaatcacagatctgcaaggaagggtcattgaggagcacgaaaggatgtttagcgccgatgtcggagagaaaaatatcgaactgagcaagaatgactgccacaccaacgtcaacaaccccgtggtgaccaacatcggaaaggattacatcggactgaaatctaggctggagcaagagtttttcggcaagacattcgagaatgacaatctgcatgtgcagctggcctacaatatcctcgacatcaagaaaattctgggaacctatgtgaacaatatcatttatatcttctacaatctgaatagggctggcaccggcagagatgagaggatgtatgacgacctcatcggcacactgtacgcttacaaacccatggaggctcaacagacctatctgctcaaaggcgacaaggatatgaggaggtttgaggaggtgaaacagctgctgcaaaacacctccgcttactatgtgtattacggcacactgttcgagaaggtgaaggctaagagcaagaaggaacagagggctaaggaggccgaaatcgacgcttgtaccgcccataactacgatgtgctgagactgctgtccctcatggcgcagctgtgcatgcactccgtcgctggaacagcctttaagctggctgagtccgctctgttcaacattgaggatgtgctcagcgccgatctgaaggaaatcctcgatgaagccttctccggcgccgtgaacaagctcaatgacggattcgtgcagcactccggcaacaatctgtacgtgctccagcagctgtaccctaatgagaccatcgagagaatcgccgagaagtactacagactcaccgtgaggaaggaggatctgaacatgggagtcaacattaaaaagctgagggagctgatcgtgggccaatactttcccgaggtcctcgacaaagaatacgacctctccaagaatggagacagcgtggtgacatacagaagcaagatttataccgtgatgaattacattctgctgtattacctcgaggaccacgactccagcagagaaagcatggtcgaagctctgagacaaaacagagagggcgatgaaggcaaggaggagatctatagacagtttgccaagaaggtgtggaacggcgtgtccggactgtttggcgtgtgtctgaacctcttcaagaccgaaaagagaaacaagtttaggagcaaagtcgccctccccgatgtgtccggcgctgcctatatgctctcctccgagaacatcgactactttgtcaagatgctcttctttgtgtgtaagtttctggatggcaaagaaatcaacgagctgctgtgcgctctgatcaacaaatttgataatattgccgatattctggatgctgccgctcaatgtggctcctccgtctggttcgtggacagctataggttcttcgagagatctaggaggattagcgcccagattagaatcgtgaagaacatcgcttccaaggattttaagaaatccaagaaggattccgatgagagctaccccgagcagctgtatctggatgctctggctctgctcggagacgtcatctccaagtacaagcagaatagagatggcagcgtcgtcatcgatgaccaaggcaatgccgtgctgacagagcaatacaagaggtttagatatgaatttttcgaggagatcaagagggacgaaagcggcggcatcaagtacaagaagtccggaaaacccgagtacaaccatcagagaaggaattttattctgaataatgtgctgaaaagcaaatggtttttctatgtggtgaagtacaataggcccagcagctgcagagaactgatgaagaataaggaaattctgaggttcgtgctgagagacatccccgactcccaagtgagaagatactttaaggccgtccaaggagaggaagcttacgctagcgccgaagctatgaggacaagactggtcgacgctctgtcccaatttagcgtcacagcttgtctggatgaagtgggcggcatgacagacaaggaattcgcctcccagagggccgtcgatagcaaagaaaaactgagagccatcatcagactgtatctgacagtcgcctatctgattaccaagagcatggtgaaggtgaatacaaggtttagcattgcctttagcgtgctggagagggactactatctgctcattgacggcaagaagaaatccagcgactacaccggagaggatatgctggctctgaccagaaaatttgtgggcgaagatgctggactgtatagagagtggaaagagaagaacgctgaagccaaggacaaatattttgacaaggccgaaaggaagaaggtgctgagacagaacgataagatgatcagaaagatgcacttcacaccccactccctcaattacgtccaaaagaatctcgaaagcgtccagagcaacggactggccgccgtcatcaaggaatatagaaatgccgtcgctcacctcaatatcatcaatagactggacgagtacattggctccgctagggctgatagctactactctctgtactgttactgcctccaaatgtatctgagcaagaacttcagcgtgggctacctcatcaacgtgcaaaagcagctggaggagcaccacacctacatgaaggatctcatgtggctgctcaacatccccttcgcttacaacctcgccagatacaaaaatctgtccaacgaaaaactcttttacgacgaggaagccgccgccgaaaaggctgacaaggctgagaacgagagaggcgaa

SEQ ID NO: 604 - DNA, 3057 bp, Artificial Sequence
  dCas13d
aagaagaagcaccagagcgccgccgagaagaggcaagtgaagaagctcaagaatcaagagaaggcccagaagtacgctagcgagccttcccccctccagagcgatacagctggcgtggaatgctcccagaaaaagacagtcgtcagccacattgccagctccaagacactggccaaggctatgggactcaaatccacactggtcatgggcgacaagctggtcatcaccagctttgctgctagcaaggctgtcggaggcgctggctacaaaagcgctaacattgaaaaaatcacagatctgcaaggaagggtcattgaggagcacgaaaggatgtttagcgccgatgtcggagagaaaaatatcgaactgagcaagaatgactgccacaccaacgtcaacaaccccgtggtgaccaacatcggaaaggattacatcggactgaaatctaggctggagcaagagtttttcggcaagacattcgagaatgacaatctgcatgtgcagctggcctacaatatcctcgacatcaagaaaattctgggaacctatgtgaacaatatcatttatatcttctacaatctgaatagggctggcaccggcagagatgagaggatgtatgacgacctcatcggcacactgtacgcttacaaacccatggaggctcaacagacctatctgctcaaaggcgacaaggatatgaggaggtttgaggaggtgaaacagctgctgcaaaacacctccgcttactatgtgtattacggcacactgttcgagaaggtgaaggctaagagcaagaaggaacagagggctaaggaggccgaaatcgacgcttgtaccgcccataactacgatgtgctgagactgctgtccctcatgaggcagctgtgcatgcactccgtcgctggaacagcctttaagctggctgagtccgctctgttcaacattgaggatgtgctcagcgccgatctgaaggaaatcctcgatgaagccttctccggcgccgtgaacaagctcaatgacggattcgtgcagcactccggcaacaatctgtacgtgctccagcagctgtaccctaatgagaccatcgagagaatcgccgagaagtactacagactcaccgtgaggaaggaggatctgaacatgggagtcaacattaaaaagctgagggagctgatcgtgggccaatactttcccgaggtcctcgacaaagaatacgacctctccaagaatggagacagcgtggtgacatacagaagcaagatttataccgtgatgaattacattctgctgtattacctcgaggaccacgactccagcagagaaagcatggtcgaagctctgagacaaaacagagagggcgatgaaggcaaggaggagatctatagacagtttgccaagaaggtgtggaacggcgtgtccggactgtttggcgtgtgtctgaacctcttcaagaccgaaaagagaaacaagtttaggagcaaagtcgccctccccgatgtgtccggcgctgcctatatgctctcctccgagaacatcgactactttgtcaagatgctcttctttgtgtgtaagtttctggatggcaaagaaatcaacgagctgctgtgcgctctgatcaacaaatttgataatattgccgatattctggatgctgccgctcaatgtggctcctccgtctggttcgtggacagctataggttcttcgagagatctaggaggattagcgcccagattagaatcgtgaagaacatcgcttccaaggattttaagaaatccaagaaggattccgatgagagctaccccgagcagctgtatctggatgctctggctctgctcggagacgtcatctccaagtacaagcagaatagagatggcagcgtcgtcatcgatgaccaaggcaatgccgtgctgacagagcaatacaagaggtttagatatgaatttttcgaggagatcaagagggacgaaagcggcggcatcaagtacaagaagtccggaaaacccgagtacaaccatcagagaaggaattttattctgaataatgtgctgaaaagcaaatggtttttctatgtggtgaagtacaataggcccagcagctgcagagaactgatgaagaataaggaaattctgaggttcgtgctgagagacatccccgactcccaagtgagaagatactttaaggccgtccaaggagaggaagcttacgctagcgccgaagctatgaggacaagactggtcgacgctctgtcccaatttagcgtcacagcttgtctggatgaagtgggcggcatgacagacaaggaattcgcctcccagagggccgtcgatagcaaagaaaaactgagagccatcatcagactgtatctgacagtcgcctatctgattaccaagagcatggtgaaggtgaatacaaggtttagcattgcctttagcgtgctggagagggactactatctgctcattgacggcaagaagaaatccagcgactacaccggagaggatatgctggctctgaccagaaaatttgtgggcgaagatgctggactgtatagagagtggaaagagaagaacgctgaagccaaggacaaatattttgacaaggccgaaaggaagaaggtgctgagacagaacgataagatgatcagaaagatgcacttcacaccccactccctcaattacgtccaaaagaatctcgaaagcgtccagagcaacggactggccgccgtcatcaaggaatatagaaatgccgtcgctcacctcaatatcatcaatagactggacgagtacattggctccgctagggctgatagctactactctctgtactgttactgcctccaaatgtatctgagcaagaacttcagcgtgggctacctcatcaacgtgcaaaagcagctggaggagcaccacacctacatgaaggatctcatgtggctgctcaacatccccttcgcttacaacctcgccagatacgcaaatctgtccaacgaaaaactcttttacgacgaggaagccgccgccgaaaaggctgacaaggctgagaacgagagaggcgaa

SEQ ID NO: 605 - DNA, 3057 bp, Artificial Sequence; identical to SEQ ID NO: 599
  dCas13d

SEQ ID NO: 606 - DNA, 3057 bp, Artificial Sequence; identical to SEQ ID NO: 600
  dCas13d

SEQ ID NO: 607 - DNA, 3057 bp, Artificial Sequence; identical to SEQ ID NO: 600
  dCas13d

SEQ ID NO: 608 - DNA, 27 bp, Artificial Sequence
  HA tag
tacccctacgatgtgcccgactacgcc

SEQ ID NO: 609 - DNA, 247 bp, Artificial Sequence
  WPRE
gataatcaacctctggattacaaaatttgtgaaagattgactggtattcttaactatgttgctccttttacgctatgtggatacgctgctttaatgcctttgtatcatgctattgcttcccgtatggctttcattttctcctccttgtataaatcctggttagttcttgccacggcggaactcatcgccgcctgccttgcccgctgctggacaggggctcggctgttgggcactgacaattccgtgg

SEQ ID NO: 610 - DNA, 30 bp, Artificial Sequence
  myc tag
gagcagaaactgattagcgaagaggatctc

SEQ ID NO: 611 - DNA, 567 bp, Artificial Sequence
  E17 endonuclease
ggtggtggcacccctaaggctcccaacctggagcctccactcccagaagaggaaaaggagggcagcgacctgagaccagtggtcatcgatgggagcaacgtggccatgagccatgggaacaaggaggtgttctcctgccggggcatcctgctggcagtgaactggtttctggagcggggccacacagacatcacagtgtttgtgccatcctggaggaaggagcagcctcggcccgacgtgcccatcacagaccagcacatcctgcgggaactggagaagaagaagatcctggtgttcacaccatcacgacgcgtgggtggcaagcgggtggtgtgctatgacgacagattcattgtgaagctggcctacgagtctgacgggatcgtggtttccaacgacacataccgtgacctccaaggcgagcggcaggagtggaagcgcttcatcgaggagcggctgctcatgtactccttcgtcaatgacaagtttatgccccctgatgacccactgggccggcacgggcccagcctggacaacttcctgcgtaagaagccactcactttggag

SEQ ID NO: 612 - DNA, 45 bp, Artificial Sequence
  linker sequence
ggtggaggcggtagcggaggtggcggaagtggcggaggaggtagt

SEQ ID NO: 613 - DNA, 350 bp, Artificial Sequence
  EFS/UBB Promoter
gggcagagcgcacatcgcccacagtccccgagaagttggggggaggggtcggcaattgaaccggtgcctagagaaggtggcgcggggtaaactgggaaagtgatgtcgtgtactggctccgcctttttcccgagggtgggggagaaccgtatataagtgcagtagtcgccgtgaacgttctttttcgcaacgggtttgccgccagaacacagaattccaggtaagtcccgcagccgtaacgaccttgggggggtgtgagattctcattctaattttgaagaatattaggtgtaaaagcaagaaatacaatgatcctgaggtgacacgcttatgttttacttttaaactag

SEQ ID NO: 614 - DNA, 1047 bp, Artificial Sequence; identical to SEQ ID NO: 452
  8puf

SEQ ID NO: 615 - DNA, 21 bp, Artificial Sequence
  linker sequence
gtggatactgccaatggcagc

SEQ ID NO: 616 - DNA, 567 bp, Artificial Sequence
  E17 endonuclease
ggtggtggcacccctaaggctcccaacctggagcctccactcccagaagaggaaaaggagggcagcgacctgagaccagtggtcatcgatgggagcaacgtggccatgagccatgggaacaaggaggtcttctcctgccggggcatcctgctggcagtgaactggtttctggagcggggccacacagacatcacagtgtttgtgccatcctggaggaaggagcagcctcggcccgacgtgcccatcacagaccagcacatcctgcgggaactggagaagaagaagatcctggtgttcacaccatcacgacgcgtgggtggcaagcgggtggtgtgctatgacgacagattcattgtgaagctggcctacgagtctgacgggatcgtggtttccaacgacacataccgtgacctccaaggcgagcggcaggagtggaagcgcttcatcgaggagcggctgctcatgtactccttcgtcaatgacaagtttatgccccctgatgacccactgggccggcacgggcccagcctggacaacttcctgcgtaagaagccactcactttggag

SEQ ID NO: 617 - DNA, 589 bp, Artificial Sequence
  WPRE
aatcaacctctggattacaaaatttgtgaaagattgactggtattcttaactatgttgctccttttacgctatgtggatacgctgctttaatgcctttgtatcatgctattgcttcccgtatggctttcattttctcctccttgtataaatcctggttgctgtctctttatgaggagttgtggcccgttgtcaggcaacgtggcgtggtgtgcactgtgtttgctgacgcaacccccactggttggggcattgccaccacctgtcagctcctttccgggactttcgctttccccctccctattgccacggcggaactcatcgccgcctgccttgcccgctgctggacaggggctcggctgttgggcactgacaattccgtggtgttgtcggggaaatcatcgtcctttccttggctgctcgcctatgttgccacctggattctgcgcgggacgtccttctgctacgtcccttcggccctcaatccagcggaccttccttcccgcggcctgctgccggctctgcggcctcttccgcgtcttcgccttcgccctcagacgagtcggatctccctttgggccgcctccccgc

SEQ ID NO: 618 - DNA, 9 bp, Artificial Sequence
  linker sequence
ggcggaagt

SEQ ID NO: 619 - DNA, 1047 bp, Artificial Sequence; identical to SEQ ID NO: 452
  8PUF

SEQ ID NO: 620 - DNA, 30 bp, Artificial Sequence
  myc tag
gagcaaaaactgattagtgaagaagatctc

SEQ ID NO: 621 - DNA, 1047 bp, Artificial Sequence; identical to SEQ ID NO: 452
  8PUF

SEQ ID NO: 622 - DNA, 1047 bp, Artificial Sequence; identical to SEQ ID NO: 452
  8puf

SEQ ID NO: 623 - DNA, 546 bp, Artificial Sequence
  PIN endonuclease
cagatggagctcgaaatcaggccgctgttcctcgtgccggacactaatggttttatagatcacttggcgtccttggctagacttctggaaagccgaaagtatatattggtagtgccgttgattgtaattaacgaattggatgggttggcgaaaggacaagagactgatcacagagcaggaggctacgcgagggtcgtccaagagaaggcgcgaaaaagcatcgagttcctggagcagcgatttgagagcagggactcatgcctgagagccctcacgtcccgggggaacgagctggagtccatcgctttccgaagtgaagacattacgggccaacttgggaataatgatgacctcatcttgtcctgctgcctgcactactgcaaggacaaggctaaggacttcatgcctgcctccaaggaggagcctatccgattgttgagggaagtagtacttttgacggacgaccgcaacctccgggtaaaggcgctgactcgaaatgtcccagtaagggatataccggcgttccttacatgggctcaagtaggg

SEQ ID NO: 624 - DNA, 3338 bp, Artificial Sequence
  A02250 vector no myc
cctgcaggcagctgcgcgctcgctcgctcactgaggccgcccgggcgtcgggcgacctttggtcgcccggcctcagtgagcgagcgagcgcgcagagagggagtggccaactccatcactaggggttcctgcggccggtcgcgtctagtactagtaattggctccggtgcccgtcagtgggcagagcgcacatcgcccacagtccccgagaagttggggggaggggtcggcaattgaaccggtgcctagagaaggtggcgcggggtaaactgggaaagtgatgtcgtgtactggctccgcctttttcccgagggtgggggagaaccgtatataagtgcagtagtcgccgtgaacgttctttttcgcaacgggtttgccgccagaacacagaattccaggtaagtcccgcagccgtaacgaccttgggggggtgtgagattctcattctaattttgaagaatattaggtgtaaaagcaagaaatacaatgatcctgaggtgacacgcttatgttttacttttaaactaggtgaattcatatctgctagcgccgccaccatgggccgcagccgccttttggaagattttcgaaacaaccggtaccccaatttacaactgcgggagattgccggacatataatggaattttcccaagaccagcatgggtccagattcattcgcctgaaactggagcgtgccacaccagctgagcgccagcttgtcttcaatgaaatcctccaggctgcctaccaactcatggtggatgtgtttggtagttacgtcattgaaaagttctttgaatttggcagtcttgaacagaagctggctttggcagaacggattcgaggtcacgtcctgtcattggcactacagatgtatggctgtcgtgttatccagaaagctcttgagtttattccttcagaccagcagaatgagatggttcgggaactagatggccatgtcttgaagtgtgtgaaagatcagaatggcagttacgtggttcgcaaatgcattgaatgtgtacagccccagtctttgcaatttatcatcgatgcgtttaagggacaggtatttgccttatccacacatccttatggctcccgagtgattgagagaatcctggagcactgtctccctgaccagacactccctattttagaggagcttcaccagcacacagagcagcttgtacaggatcaatatggatgttatgtaatccagcatgtactggagcacggtcgtcctgaggataaaagcaaaattgtagcagaaatccgaggcaatgtacttgtattgagtcagcacaaatttgcaagctatgttgtgcgcaagtgtgttactcacgcctcacgtacggagcgcgctgtgctcatcgatgaggtgtgcaccatgaacgacggtccccacagtgccttatacaccatgatgaaggaccagtatgccagctacgtggtcgagaagatgattgacgtggcggagccaggccagcggaagatcgtcatgcataagatccgaccccacatcgcaactcttcgtaagtacacctatggcaagcacattctggccaagctggagaagtactacatgaagaacggtgttgacttaggcgtggatactgccaatggcagccagatggagctcgaaatcaggccgctgttcctcgtgccggacactaatggttttatagatcacttggcgtccttggctagacttctggaaagccgaaagtatatattggtagtgccgttgattgtaattaacgaattggatgggttggcgaaaggacaagagactgatcacagagcaggaggctacgcgagggtcgtccaagagaaggcgcgaaaaagcatcgagttcctggagcagcgatttgagagcagggactcatgcctgagagccctcacgtcccgggggaacgagctggagtccatcgctttccgaagtgaagacattacgggccaacttgggaataatgatgacctcatcttgtcctgctgcctgcactactgcaaggacaaggctaaggacttcatgcctgcctccaaggaggagcctatccgattgttgagggaagtagtacttttgacggacgaccgcaacctccgggtaaaggcgctgactcgaaatgtcccagtaagggatataccggcgttccttacatgggctcaagtagggtaatcgcggccgctcgaggattataaggatgacgacgataaattcgtcgagcaccaccaccaccaccactaataaggtttatccgatccaccggatctagataagattgaatgcaattgttgttgttaatcaacctctggattacaaaatttgtgaaagattgactggtattcttaactatgttgctccttttacgctatgtggatacgctgctttaatgcctttgtatcatgctattgcttcccgtatggctttcattttctcctccttgtataaatcctggttgctgtctctttatgaggagttgtggcccgttgtcaggcaacgtggcgtggtgtgcactgtgtttgctgacgcaacccccactggttggggcattgccaccacctgtcagctcctttccgggactttcgctttccccctccctattgccacggcggaactcatcgccgcctgccttgcccgctgctggacaggggctcggctgttgggcactgacaattccgtggtgttgtcggggaaatcatcgtcctttccttggctgctcgcctatgttgccacctggattctgcgcgggacgtccttctgctacgtcccttcggccctcaatccagcggaccttccttcccgcggcctgctgccggctctgcggcctcttccgcgtcttcgccttcgccctcagacgagtcggatctccctttgggccgcctccccgcaacttgtttattgcagcttatatccgatccaccggatctagataactgatcataatcagccataccacatttgtagaggttttacttgctttaaaaaacctcccacacctccccctgaacctgaaacataaaatgaatgcaattgttgttgttaacttgtttattgcagcttataatggttacaaataaagcaatagcatcacaaatttcacaaataaagcatttttttcactgcattctagttgtggtttgtccaaactcatcaatgtatcttaacgcggtaaccacgtgcggacccaacggccgcaggaacccctagtgatggagttggccactccctctctgcgcgctcgctcgctcactgaggccgggcgaccaaaggtcgcccgacgcccgggctttgcccgggcggcctcagtgagcgagcgagcgcgcagctgcctgcagg

SEQ ID NO: 625 - DNA, 3377 bp, Artificial Sequence
  A02250 vector - myc
cctgcaggcagctgcgcgctcgctcgctcactgaggccgcccgggcgtcgggcgacctttggtcgcccggcctcagtgagcgagcgagcgcgcagagagggagtggccaactccatcactaggggttcctgcggccggtcgcgtctagtactagtaattggctccggtgcccgtcagtgggcagagcgcacatcgcccacagtccccgagaagttggggggaggggtcggcaattgaaccggtgcctagagaaggtggcgcggggtaaactgggaaagtgatgtcgtgtactggctccgcctttttcccgagggtgggggagaaccgtatataagtgcagtagtcgccgtgaacgttctttttcgcaacgggtttgccgccagaacacagaattccaggtaagtcccgcagccgtaacgaccttgggggggtgtgagattctcattctaattttgaagaatattaggtgtaaaagcaagaaatacaatgatcctgaggtgacacgcttatgttttacttttaaactaggtgaattcatatctgctagcgccgccaccatgggccgcagccgccttttggaagattttcgaaacaaccggtaccccaatttacaactgcgggagattgccggacatataatggaattttcccaagaccagcatgggtccagattcattcgcctgaaactggagcgtgccacaccagctgagcgccagcttgtcttcaatgaaatcctccaggctgcctaccaactcatggtggatgtgtttggtagttacgtcattgaaaagttctttgaatttggcagtcttgaacagaagctggctttggcagaacggattcgaggtcacgtcctgtcattggcactacagatgtatggctgtcgtgttatccagaaagctcttgagtttattccttcagaccagcagaatgagatggttcgggaactagatggccatgtcttgaagtgtgtgaaagatcagaatggcagttacgtggttcgcaaatgcattgaatgtgtacagccccagtctttgcaatttatcatcgatgcgtttaagggacaggtatttgccttatccacacatccttatggctcccgagtgattgagagaatcctggagcactgtctccctgaccagacactccctattttagaggagcttcaccagcacacagagcagcttgtacaggatcaatatggatgttatgtaatccagcatgtactggagcacggtcgtcctgaggataaaagcaaaattgtagcagaaatccgaggcaatgtacttgtattgagtcagcacaaatttgcaagctatgttgtgcgcaagtgtgttactcacgcctcacgtacggagcgcgctgtgctcatcgatgaggtgtgcaccatgaacgacggtccccacagtgccttatacaccatgatgaaggaccagtatgccagctacgtggtcgagaagatgattgacgtggcggagccaggccagcggaagatcgtcatgcataagatccgaccccacatcgcaactcttcgtaagtacacctatggcaagcacattctggccaagctggagaagtactacatgaagaacggtgttgacttaggcgtggatactgccaatggcagccagatggagctcgaaatcaggccgctgttcctcgtgccggacactaatggttttatagatcacttggcgtccttggctagacttctggaaagccgaaagtatatattggtagtgccgttgattgtaattaacgaattggatgggttggcgaaaggacaagagactgatcacagagcaggaggctacgcgagggtcgtccaagagaaggcgcgaaaaagcatcgagttcctggagcagcgatttgagagcagggactcatgcctgagagccctcacgtcccgggggaacgagctggagtccatcgctttccgaagtgaagacattacgggccaacttgggaataatgatgacctcatcttgtcctgctgcctgcactactgcaaggacaaggctaaggacttcatgcctgcctccaaggaggagcctatccgattgttgagggaagtagtacttttgacggacgaccgcaacctccgggtaaaggcgctgactcgaaatgtcccagtaagggatataccggcgttccttacatgggctcaagtagggggcggatctgagcagaaactgattagcgaagaggatctctaatcgcggccgctcgaggattataaggatgacgacgataaattcgtcgagcaccaccaccaccaccactaataaggtttatccgatccaccggatctagataagattgaatgcaattgttgttgttaatcaacctctggattacaaaatttgtgaaagattgactggtattcttaactatgttgctccttttacgctatgtggatacgctgctttaatgcctttgtatcatgctattgcttcccgtatggctttcattttctcctccttgtataaatcctggttgctgtctctttatgaggagttgtggcccgttgtcaggcaacgtggcgtggtgtgcactgtgtttgctgacgcaacccccactggttggggcattgccaccacctgtcagctcctttccgggactttcgctttccccctccctattgccacggcggaactcatcgccgcctgccttgcccgctgctggacaggggctcggctgttgggcactgacaattccgtggtgttgtcggggaaatcatcgtcctttccttggctgctcgcctatgttgccacctggattctgcgcgggacgtccttctgctacgtcccttcggccctcaatccagcggaccttccttcccgcggcctgctgccggctctgcggcctcttccgcgtcttcgccttcgccctcagacgagtcggatctccctttgggccgcctccccgcaacttgtttattgcagcttatatccgatccaccggatctagataactgatcataatcagccataccacatttgtagaggttttacttgctttaaaaaacctcccacacctccccctgaacctgaaacataaaatgaatgcaattgttgttgttaacttgtttattgcagcttataatggttacaaataaagcaatagcatcacaaatttcacaaataaagcatttttttcactgcattctagttgtggtttgtccaaactcatcaatgtatcttaacgcggtaaccacgtgcggacccaacggccgcaggaacccctagtgatggagttggccactccctctctgcgcgctcgctcgctcactgaggccgggcgaccaaaggtcgcccgacgcccgggctttgcccgggcggcctcagtgagcgagcgagcgcgcagctgcctgcagg

SEQ ID NO: 626 - protein, 182 aa, Artificial Sequence
  PIN nuclease
QMELEIRPLFLVPDTNGFIDHLASLARLLESRKYILVVPLIVINELDGLAKGQETDHRAGGYARVVQEKARKSIEFLEQRFESRDSCLRALTSRGNELESIAFRSEDITGQLGNNDDLILSCCLHYCKDKAKDFMPASKEEPIRLLREVVLLTDDRNLRVKALTRNVPVRDIPAFLTWAQVG

SEQ ID NO: 627 - DNA, 448 bp, Artificial Sequence
  human synapsin promoter
agtgcaagtgggttttaggaccaggatgaggcggggtgggggtgcctacctgacgaccgaccccgacccactggacaagcacccaacccccattccccaaattgcgcatcccctatcagagagggggaggggaaacaggatgcggcgaggcgcgtgcgcactgccagcttcagcaccgcggacagtgccttcgcccccgcctggcggcgcgcgccaccgccgcctcagcactgaaggcgcgctgacgtcactcgccggtcccccgcaaactccccttcccggccaccttggtcgcgtccgcgccgccgccggcccagccggaccgcaccacgcgaggcgcgagataggggggcacgggcgcgaccatctgcgctgcggcgccggcgactcagcgctgcctcagtctgcggtgggcagcggaggagtcgtgtcgtgcctgagagcgcag

SEQ ID NO: 628 - protein, 12 aa, Artificial Sequence
  linker sequences
AEAAAKEAAAKA

SEQ ID NO: 629 - protein, 17 aa, Artificial Sequence
  linker sequences
AEAAAKEAAAKEAAAKA

SEQ ID NO: 630 - protein, 22 aa, Artificial Sequence
  linker sequences
AEAAAKEAAAKEAAAKEAAAKA

SEQ ID NO: 631 - protein, 20 aa, Artificial Sequence
  linker sequences
YVEFEGEQGVDEGGVSGGGS

SEQ ID NO: 632 - protein, 20 aa, Artificial Sequence
  linker sequences
GSRNLDFQALEETTEYDGGY

SEQ ID NO: 633 - protein, 25 aa, Artificial Sequence
  linker sequences
ASSTSPVEISEWLDQKLTKSDRPEL

SEQ ID NO: 634 - protein, 16 aa, Artificial Sequence
  linker sequences
VNQCRRQSEDSTFYLG

SEQ ID NO: 635 - protein, 21 aa, Artificial Sequence
  linker sequences
AVSPLLLTTTNSSEGLSMGNY

SEQ ID NO: 636 - protein, 21 aa, Artificial Sequence
  linker sequences
LDEAYPGKKLLPDDPYEKACQ

SEQ ID NO: 637 - protein, 49 aa, Artificial Sequence
  linker sequences
SAAAATPAVRTVPQYKYAAGVRNPQQHLNAQPQVTMQQPAVHVQGQEPL

SEQ ID NO: 638 - protein, 15 aa, Artificial Sequence
  linker sequences
GGGGSEAAAKGGGGS

SEQ ID NO: 639 - protein, 25 aa, Artificial Sequence
  linker sequences
GGGGSEAAAKGGGGSEAAAKGGGGS

SEQ ID NO: 640 - protein, 26 aa, Artificial Sequence
  linker sequences
GGGGSSGSETGGTSESATGESGGGGS

SEQ ID NO: 641 - protein, 16 aa, Artificial Sequence
  linker sequences
SGSETPGTSESATPES

SEQ ID NO: 642 - DNA, 212 bp, Artificial Sequence
  human EF1a core promoter
gggcagagcgcacatcgcccacagtccccgagaagttggggggaggggtcggcaattgatccggtgcctagagaaggtggcgcggggtaaactgggaaagtgatgtcgtgtactggctccgcctttttcccgagggtgggggagaaccgtatataagtgcagtagtcgccgtgaacgttctttttcgcaacgggtttgccgccagaacacag

SEQ ID NO: 643 - DNA, 130 bp, Artificial Sequence
  modified UBB intron
gtaagtcccgcagccgtaacgaccttgggggggtgtgagattctcattctaattttgaagaatattaggtgtaaaagcaagaaatacaatgatcctgaggtgacacgcttatgttttacttttaaactag

SEQ ID NO: 644 - DNA, 304 bp, Artificial Sequence
  modified CMV enhancer
cgttacataacttacggtaaatggcccgcctggctgaccgcccaacgacccccgcccattgacgtcaataatgacgtatgttcccatagtaacgccaatagggactttccattgacgtcaatgggtggagtatttacggtaaactgcccacttggcagtacatcaagtgtatcatatgccaagtacgccccctattgacgtcaatgacggtaaatggcccgcctggcattatgcccagtacatgaccttatgggactttcctacttggcagtacatctacgtattagtcatcgctattaccatg

SEQ ID NO: 645 - DNA, 675 bp, Artificial Sequence
  eCMV-EFS-UBB promoter
cgttacataacttacggtaaatggcccgcctggctgaccgcccaacgacccccgcccattgacgtcaataatgacgtatgttcccatagtaacgccaatagggactttccattgacgtcaatgggtggagtatttacggtaaactgcccacttggcagtacatcaagtgtatcatatgccaagtacgccccctattgacgtcaatgacggtaaatggcccgcctggcattatgcccagtacatgaccttatgggactttcctacttggcagtacatctacgtattagtcatcgctattaccatggggcagagcgcacatcgcccacagtccccgagaagttggggggaggggtcggcaattgatccggtgcctagagaaggtggcgcggggtaaactgggaaagtgatgtcgtgtactggctccgcctttttcccgagggtgggggagaaccgtatataagtgcagtagtcgccgtgaacgttctttttcgcaacgggtttgccgccagaacacagaattccaggtaagtcccgcagccgtaacgaccttgggggggtgtgagattctcattctaattttgaagaatattaggtgtaaaagcaagaaatacaatgatcctgaggtgacacgcttatgttttacttttaaactaggtgaattcatggcgcgccacc

SEQ ID NO: 646 - protein, 36 aa, Artificial Sequence
  PUF R1 U recognition
HIMEFSQDQHGNRFIQLKLERATPAERQLVFNEILQ

SEQ ID NO: 647 - protein, 36 aa, Artificial Sequence
  PUF R2 U recognition
AAYQLMVDVFGNYVIQKFFEFGSLEQKLALAERIRG

SEQ ID NO: 648 - protein, 36 aa, Artificial Sequence
  PUF R3 U recognition
HVLSLALQMYGNRVIQKALEFIPSDQQNEMVRELDG

SEQ ID NO: 649 - protein, 36 aa, Artificial Sequence
  PUF R4 U recognition
HVLKCVKDQNGNHVVQKCIECVQPQSLQFIIDAFKG

SEQ ID NO: 650 - protein, 36 aa, Artificial Sequence
  PUF R5 U recognition
QVFALSTHPYGNRVIQRILEHCLPDQTLPILEELHQ

SEQ ID NO: 651 - protein, 36 aa, Artificial Sequence
  PUF R6 U recognition
HTEQLVQDQYGNYVIQHVLEHGRPEDKSKIVAEIRG

SEQ ID NO: 652 - protein, 43 aa, Artificial Sequence
  PUF R7 U recognition
NVLVLSQHKFANNVVQKCVTHASRTERAVLIDEVCTMNDGPHS

SEQ ID NO: 653 - protein, 36 aa, Artificial Sequence
  PUF R8 U recognition
ALYTMMKDQYANYVVQKMIDVAEPGQRKIVMHKIRP

SEQ ID NO: 654 - DNA, 1060 bp, Artificial Sequence
  Human desmin promoter full
taccccctgccccccacagctcctctcctgtgccttgtttcccagccatgcgttctcctctataaatacccgctctggtatttggggttggcagctgttgctgccagggagatggttgggttgacatgcggctcctgacaaaacacaaacccctggtgtgtgtgggcgtgggtggtgtgagtagggggatgaatcagggagggggcaggggacccagggggcaggagccacacaaagtctgtgcgggggtgggagcgcacatagcaattggaaactgaaagcttatcagaccctttctggaaatcagcccactgtttataaacttgaggccccaccctcgacagtaccggggaggaagagggcctgcactagtccagagggaaactgaggctcagggccagctcgcccatagacatacatggcaggcaggctttggccaggatccctccgcctgccaggcgtctccctgccctcccttcctgcctagagacccccaccctcaagcctggctggtctttgcctgagacccaaacctcttcgacttcaagagaatatttaggaacaaggtggtttagggcctttcctgggaacaggccttgaccctttaagaaatgacccaaagtctctccttgaccaaaaaggggaccctcaaactaaagggaagcctctcttctgctgtctcccctgaccccactcccccccaccccaggacgaggagataaccagggctgaaagaggcccgcctgggggctgcagacatgcttgctgcctgccctggcgaaggattggcaggcttgcccgtcacaggacccccgctggctgactcaggggcgcaggccttttgcgggggagctggcctccccgcccccacggccacgggccgccctttcctggcaggacagcgggatcttgcagctgtcaggggaggggaggcgggggctgatgtcaggagggatacaaatagtgccgacggctgggggccctgtctcccctcgccgcatccactctccggccggccgcctgcccgccgcctcctccgtgcgcccgccagcctcgcccg

SEQ ID NO: 655 - DNA, 708 bp, Artificial Sequence
  human desmin promoter truncated
acccatgcctcctcaggtaccccctgccccccacagctcctctcctgtgccttgtttcccagccatgcgttctcctctataaatacccgctctggtatttggggttggcagctgttgctgccagggagatggttgggttgacatgcggctcctgacaaaacacaaacccctggtgtgtgtgggcgtgggtggtgtgagtagggggatgaatcagggagggggcaggggacccagggggcaggagccacacaaagtctgtgcgggggtgggagcgcacatagcaattggaaactgaaagcttatcagaccctttctggaaatcagcccactgtttataaacttgaggccccaccctcgagataaccagggctgaaagaggcccgcctgggggctgcagacatgcttgctgcctgccctggcgaaggattggcaggcttgcccgtcacaggacccccgctggctgactcaggggcgcaggccttttgcgggggagctggcctccccgcccccacggccacgggccgccctttcctggcaggacagcgggatcttgcagctgtcaggggaggggaggcgggggctgatgtcaggagggatataaatagtgccgacggctgggggccctgtctcccctcgccgcatccactctccggccggccgcctgcccgccgcctcctccgtgcgcccgccagcctcgcccgcgccgtc

SEQ ID NO: 656 - protein, 349 aa, Artificial Sequence
  8puf
GRSRLLEDFRNNRYPNLQLREIAGHIMEFSQDQHGSYFIRLKLERATPAERQLVFNEILQAAYQLMVDVFGSNVIEKFFEFGSLEQKLALAERIRGHVLSLALQMYGCRVIQKALEFIPSDQQNEMVRELDGHVLKCVKDQNGSYVVRKCIECVQPQSLQFIIDAFKGQVFALSTHPYGSNVIERILEHCLPDQTLPILEELHQHTEQLVQDQYGCRVIQHVLEHGRPEDKSKIVAEIRGNVLVLSQHKFASYVVRKCVTHASRTERAVLIDEVCTMNDGPHSALYTMMKDQYASNVVEKMIDVAEPGQRKIVMHKIRPHIATLRKYTYGKHILAKLEKYYMKNGVDLG
